(19) United States
(12) Patent Application Publication
(10) Pub. No.: US 2006/0137042 A1
(43) Pub. Date: Jun. 22, 2006

(54) Process for the production of fine chemicals

(75) Inventors: Gunnar Plesch, Potsdam (DE); Piotr Puzio, Berlin (DE); Astrid Blau, Stahnsdorf (DE); Ralf Looser, Berlin (DE); Birgit Wendel, Berlin (DE); Beate Kamlage, Berlin (DE); Agnes Chardonnens, Berlin (DE); Amber Shirley, Wake Forest, NC (US); Xi-Qing Wang, Chapel Hill, NC (US); Rodrigo Sarria-Millan, Morrisville, NC (US); Bryan McKersie, Cary, NC (US); Ruoying Chen, Apex, NC (US)

Correspondence Address: CONNOLLY BOVE LODGE & HUTZ, LLP, P O BOX 2207, WILMINGTON, DE, 19899, US

(73) Assignee: BASF Plant Science GmbH, Ludwigshafen (DE)

(21) Appl. No.: 10/566,644

(22) PCT Filed: Jul. 21, 2004
(86) PCT No.: PCT/EP04/08136

§ 371 Date: Feb. 22, 2006

Related U.S. Application Data
(63) Continuation-in-part of application No. PCT/US04/11887, filed on Apr. 15, 2004.

(30) Foreign Application Priority Data
Aug. 1, 2003 (EP) 03016672.2
Apr. 15, 2004 (EP) 03008079.0
Aug. 1, 2003 (EP) 03016671.4
Sep. 30, 2003 (EP) 03022226.9

(51) Int. Cl. A01H 1/00; C12N 15/82; C12N 5/04

(52) U.S. Cl. 800/288; 435/419; 435/468

(57) ABSTRACT

The present invention relates to a process for the production of the fine chemical in a microorgansm, a plant cell, a plant, a plant tissue or in one or more parts thereof. The invention furthermore relates to nucleic acid molecules, polypeptides, nucleic acid constructs, vectors, antisense molecules, antibodies, host cells, plant tissue, propagtion material, harvested material, plants, microorganisms as well as agricultural compositions and to their use.

[0001] The present invention relates to a process for the production of the fine chemical in a microorgansm, a plant cell, a plant, a plant tissue or in one or more parts thereof. The invention furthermore relates to nucleic acid molecules, polypeptides, nucleic acid constructs, vectors, antisense molecules, antibodies, host cells, plant tissue, propagtion material, harvested material, plants, microorganisms as well as agricultural compositions and to their use.

[0002] Certain products and by-products of naturally-occurring metabolic processes in cells have utility in a wide array of industries, including, but not limited to, the food, feed, cosmetics, and pharmaceutical industries and agriculture. These molecules, collectively termed ‘fine chemicals’ include molecules such as vitamins for example vitamin A, D, E, K, B₁, B₂, B₆, B₁₂, C, pantothenic acid, biotin or folic acid; substances with vitamin-like character for example vitamin F, lipoic acid, ubiquinones, choline, myoinsositiol, vitamin U (S-methylmethionine), flavours for example vanillin, coumarin, isoeugenol, eugenol, (R)-carvone, (S)-carvone, menthol, jasmone or farnesol; nutraceuticals for example phytosterols, flavonoids, anthocyanidins, isoflavons or isoprenoids; detergents; fatty acids such as saturated fatty acids, mono unsaturated fatty acids (singular MUFA, plural MUFAS), poly unsaturated fatty acids (singular PUFA, plural PUFAS), waxes or lipids containing said fatty acids; carbohydrates for example cellulose, starch, dextrin, pectin, xanthangum, carrageenan or alginate; sugars for example monosaccharides such as glucose, fructose, manose, sorbose, ribose, ribulose, xylose, xylulose or galactose, disaccharides such as lactose, sucrose, saccharose, maltose, isomaltose or cellobiose, trisaccharides such as raffinose or maltotriose; carboxylic acids for example citric acid, α-ketoglutaric acid, ferulic acid, sinapic acid or lactic acid; carotinoids for example α-carotene, β-carotene, zeaxanthine, lutein, astaxanthine, lycopene, phyotoene or phytofluene, amino acids for example lysine, threonine, methionine, tryptophane, phenylalanine or tyrosine, cofactors for example heme or quinines, enzymes for example lipases, esterases, proteases, amylases, glucosidases etc. and other compounds [as described e.g. in Kuninaka, A. (1996) Nucleotides and related compounds, p. 561-612, in Biotechnology vol. 6, Rehm et al., eds. VCH: Weinheim, in Industial Microbiology and Biotechnology, Demain et al., second edition, ASM Press Washington, D.C. 1999, in Ullmann's Encyclopedia of Industrial Chemistry, vol. A27, Vitamins, p. 443-613 (1996) VCH: Weinheim and Ong, A. S., Niki, E. & Packer, L. (1995) Nutrition, Lipids, Health, and Disease Proceedings of the UNESCO/Confederation of Scientific and Technological Associations in Malaysia, and the Society for Free Radical Research, Asia, held Sep. 1-3, 1994 at Penang, Malaysia, AOCS Press, (1995)), enzymes, and all other chemicals described in Gutcho (1983) Chemicals by Fermentation, Noyes Data Corporation, ISBN: 0818805086 and references contained therein]. Carotinoids are added for example to soft drinks, margarines or to animal feed for example to colour egg yolk or the flesh of fish. In the food industry polycarbohydrates are widely used as thickener. Polyunsaturated fatty acids are added for example to infant formulas to create a higher nutrition value of such formulas. PUFAs have for example a positive influence on the cholesterol level of the blood in humans and therefore are useful in the protection of heart diseases. Fine chemicals for example PUFAS can be isolated from animal sources such as for example fish or produced with microorganisms through the large-scale culture of microorganisms developed to produce and accumulate or secrete large quantities of one or more desired molecules.

[0003] In large scale fine chemicals are produced with microorganism in the fermentation industry, which is responsible for the manufacturing of at least five major ingredient categories: antibiotics, organic acids, amino acids, enzymes, vitamins and other related products. There are production facilities in all important areas of the world especially in Europe, the US and Asia. Companies continuously try to optimize the production processes, the organisms and thereby increasing the efficiency but, as in the case of amino acids and organic acids, with already high conversion rates based on feeded carbon source, the limitations of such work become evident. All fermentation processes depend on the efficient utilization of carbohydrates, supplied mainly in the form of oils, glucose or molasses. It is therefore the availability and pricing of these raw materials that influence the competitiveness of fermentation products versus production for example in plants. Amino acids, organic acids and vitamins are offered at very low prices. For such products the question is whether it is still economical to continue fermentation production in future. And that is frequently a question of comparing the availability and pricing of carbohydrates with the future markets.

[0004] Particularly useful organisms for the production of fine chemicals are microorganisms such as the algae, fungi, bacteria or plants. Through strain selection, a number of mutant strains of microorganisms have been developed which produce an array of desirable compounds including vitamins, amino acids, PUFAs etc. However, selection of strains improved for the production of a particular molecule is a time-consuming and difficult process.

[0005] Alternatively the production of fine chemicals can be most conveniently performed via the large scale production of plants developed to produce for example carotinoids, carbohydrates or PUFAS. For example for the production of carotinoids plants such as marigold are used. Particularly well-suited plants for this purpose are sugar producing plants such as sugar beet or sugar cane or oilseed plants containing high amounts of lipid compounds such as rapeseed, canola, linseed, soybean, sunflower, borage and evening primrose. But also other crop plants containing sugars, oils or lipids and fatty acids are well suited as mentioned in the detailed description of this invention. Through conventional breeding, a number of mutant plants have been developed which produce an array of desirable lipids and fatty acids, cofactors and enzymes. However, selection of new plant cultivars improved for the production of a particular molecule is a time-consuming and difficult process or even impossible if the compound does not naturally occur in the respective plant as for example in the case of C₂₀ and higher C-carbon chain polyunsaturated fatty acids.

[0006] Carbohydrates are an important dietary nutrient, which is mostly used to supply energy to the body, as well as, a carbon source for synthesis of other compounds such as fats or proteins. Furthermore mono- and disaccharides are widely used in the food and feed industry as sweetener. Saccharides have varying degrees of sweetness on a relative scale. Fructose is the sweetest. For example in the United States 22 million tons of sugar and other sweeteners were consumed in 1999. Said natural sweetener consumption includes the consumption of sugar, corn sweeteners such as high fructose corn syrup as main product and others such as honey or maple syrup. All natural sugar based sweeteners have a market shar of around 36 to 40 percent.

[0007] Whether unsaturated or saturated fatty acids are preferred in the food and feed industry depends on the intended purpose; thus, for example, lipids with unsaturated fatty acids, specifically polyunsaturated fatty acids, are preferred in human nutrition since they have a positive effect on the cholesterol level in the blood and thus on the possibility of heart disease. They are used in a variety of dietetic foodstuffs or medicaments. In addition PUFAs are commonly used in food, feed and in the cosmetic industry. Poly unsaturated ω-3- and/or ω-6-fatty acids are an important part of animal feed and human food. Because of the common composition of human food poly unsaturated ω-3-fatty acids, which are an essential component of fish oil, should be added to the food to increase the nutritional value of the food; thus, for example, poly unsaturated fatty acids such as docosahexaenoic acid or eicosapentaenoic acid are added as mentioned above to infant formula to increase its nutritional value.

[0008] Vitamins such as vitamin C, vitamin B12 or vitamin B2 are typically produced with microorganism as mentioned above in the fermentation industry. Vitamin C can be produced generally in a combined process using biotransformation steps in combination with classical chemical synthesis. In another production process vitamin C is produced by fermentation alone. In general organisms such as Arthrobacter, Gluconobacter, Corynebacterium, Brevibacterium or Erwinia are used for vitamin C production. Vitamin B2 and vitamin B12 are produced with organisms such as Bacillus, Streptomyces, Citrobacter, Klebsiella, Propionibacterium or Ashbya in large scale fermentation.

[0009] Commonly vitamin E and A are procuded in a classical chemical process or isolated from as natural vitamin E from plant oils. Vitamin E is an important natural fat-soluble antioxidants. As such, vitamin E protects cell membranes from the damage caused by free radicals. High doses of vitamin E have also been linked to a decreased ability of the blood to clot, which may be beneficial in those individuals at risk for heart disease by reducing the risk of heart attack. A vitamin E deficiency leads to pathophysiological situations in humans and animals. Of the different types of vitamin E, the alpha tocopherol form is typically considered the “gold standard” in terms of antioxidant activity—although the most recent research suggests that the other chemical forms may possess equivalent or superior antioxidant protection. Vitamin E compounds therefore are of high economical value as additives in the food and feed sectors, in pharmaceutical formulations and in cosmetic applications. Vitamin A is another fat-soluble vitamin that is part of a family of compounds including retinol, retinal and beta-carotene. Beta-carotene is also known as pro-vitamin A because it can be converted into vitamin A when additional levels are required. Vitamin A is needed by all of the body's tissues for general growth and repair processes and is especially important for bone formation, healthy skin/hair, night vision and function of the immune system. Vitamin A may help boost immune system function and resistance to infection. Vitamin A derivatives are widely used in cosmetics and dermatological treatments for skin preparations designed to combat skin aging and treat acne. Vitamin A has been used for decades as a treatment for various vision-related conditions, including night blindness, cataracts, conjunctivitis, retinopathy and macular degeneration.

[0010] An economical method for producing of vitamins such as vitamin C, B2, B12 or vitamin E and food- and feedstuffs with increased vitamin content are therefore very important. Particularly economical methods are biotechnological methods utilizing vitamin-producing organisms, which are either natural or optimized by genetic modification.

[0011] Carotenoids are a large family of compounds including over 600 members such as β-carotene, lycopene or lutein. Carotenoids are widely distributed in fruits and vegetables and are responsible, along with flavonoids, for contributing the color to many plants (a rule of thumb is the brighter, the better). In terms of nutrition, β-carotene's primary role is as mentioned above a precursor to vitamin A. β-carotene as most other carotenoids, is a powerful antioxidant—so it has been recommended to protect against a variety of diseases such as cancer, cataracts and heart disease.

[0012] The introduction of a new gene or new genes for the synthesis of fine chemicals into an organism or cell may not just increase the biosynthetic flux towards an end product it may also increase or create de novo a new compound composition. Similarly, other genes involved in the import of nutrients necessary for the biosynthesis of one or more fine chemicals (e.g., fatty acids, polar and neutral lipids, vitamins, enzymes etc.) may be increased in number or activity such that these precursors, cofactors, or intermediate compounds are increased in concentration within the cell or within the storing compartment thus increasing further the capability of the cell to produce the fine chemical as described herein.

[0013] Amino acids are used in many branches of industry, including the food, animal feed, cosmetics, pharmaceutical and chemical industries. Amino acids such as D,L-methionine, L-lysine or L-threonine are used in the animal feed industry. The essential amino acids valine, leucine, isoleucine, lysine, threonine, methionine, tyrosine, phenylalanine and tryptophan are particularly important for the nutrition of mammals especially humans and a number of livestock species. Glycine, L-methionine and tryptophan are all used in the pharmaceutical industry. Glutamine, valine, leucine, isoleucine, histidine, arginine, proline, serine and alanine are used in the pharmaceutical and cosmetics industries. Threonine, tryptophan and D,L-methionine are widely used feed additives (Leuchtenberger, W. (1996) Amino acids—technical production and use, pp. 466-502 in Rehm et al., (Ed.) Biotechnology vol. 6, chapter 14a, VCH Weinheim). Moreover, amino acids are suitable for the chemical industry as precursors for the synthesis of synthetic amino acids and proteins, such as N-acetylcysteine, S-carboxymethyl-L-cysteine, (S)-5-hydroxytryptophan and other subtances described in Ullmann's Encyclopedia of Industrial Chemistry, vol. A2, pp. 57-97, VCH Weinheim, 1985. To prefent physiological malnutritions the human body has a need for essentiall amino acids such as arginine, histidine, isoleucine, leucine, lysine, methionine, tyrosine, phenylalanine, threonine, tryptophan, and valine. Based on their content of amino acids, foods are often classified as complete, partially complete, or incomplete protein sources. In order for a protein to be complete, it must contain all of the essential amino acids. This is the reason that many nutritionists rank non-meat foods as being incomplete. The foods do contain all amino acids, but some may be in lower proportions than are required, and, therefore, should be combined with another food containing higher amounts of these amino acids or should be supplemented with said essential amino acids.

[0014] Over one million tonnes of amino acids are currently produced annually; their market value amounts to over 2.5 billion US dollars. They are currently produced by four competing processes: Extraction from protein hydrolysates, for example L-cystine, L-leucine or L-tyrosine, chemical synthesis, for example of D,L-methionine, conversion of chemical precursors in an enzyme or cell reactor, for example L-phenylalanine, and fermentative production by growing, on an industrial scale, bacteria which have been developed to produce and secrete large amounts of the desired molecule in question. An organism, which is particularly suitable for this purpose is Corynebacterium glutamicum, which is used for example for the production of L-lysine or L-glutamic acid. Other amino acids which are produced by fermentation are, for example, L-threonine, L-tryptophan, L-aspartic acid and L-phenylalanine.

[0015] The biosynthesis of the natural amino acids in organisms capable of producing them, for example bacteria, has been characterizied thoroughly; for a review of the bacterial amino acid biosynthesis and its regulation, see Umbarger, H. E. (1978) Ann. Rev. Biochem. 47: 533-606].

[0016] It is known that amino acids are produced by fermentation of strains of coryneform bacteria, in particular Corynebacterium glutamicum. Due to their great importance, the production processes are constantly being improved. Process improvements can relate to measures regarding technical aspects of the fermentation, such as, for example, stirring and oxygen supply, or the nutrient media composition, such as, for example, the sugar concentration during fermentation, or to the work-up to give the product, for example by ion exchange chromatography, or to the intrinsic performance properties of the microorganism itself. Bacteria from other genera such as Escherichia or Bacillus are also used for the production of amino acids. A number of mutant strains, which produce an assortment of desirable compounds from the group of the sulfur-containing fine chemicals have been developed via strain selection. The performance properties of said microorganisms are improved with respect to the production of a particular molecule by applying methods of mutagenesis, selection and mutant selection. Methods for the production of methionine have also been developed. In this manner, strains are obtained which are, for example, resistant to antimetabolites, such as, for example, the methionine analogues α-methylmethionine, ethionine, norleucine, N-acetylnorleucine, S-trifluoromethylhomocysteine, 2-amino-5-heprenoitic acid, selenomethionine, methionine sulfoximine, methoxine, 1-aminocyclopentanecarboxylic acid or which are auxotrophic for metabolites with regulatory importance and which produce sulfur-containing fine chemicals such as, for example, L-methionine. However, such processes developed for the production of methionine have the disadvantage that their yields are too low for being economically exploitable and that they are therefore not yet competitive with regard to chemical synthesis.

[0017] Zeh (Plant Physiol., Vol. 127, 2001: 792-802) describes increasing the methionine content in potato plants by inhibiting threonine synthase by what is known as antisense technology. This leads to a reduced threonine synthase activity without the threonine content in the plant being reduced. This technology is highly complex; the enzymatic activity must be inhibited in a very differentiated manner since otherwise auxotrophism for the amino acid occurs and the plant will no longer grow.

[0018] U.S. Pat. No. 5,589,616 teaches the production of higher amounts of amino acids in plants by overexpressing a monocot storage protein in dicots. WO 96/38574, WO 97/07665, WO 97/28247, U.S. Pat. No. 4,886,878, U.S. Pat. No. 5,082,993 and U.S. Pat. No. 5,670,635 are following this approach. That means in all the aforementioned intellectual property rights different proteins or polypeptides are expressed in plants. Said proteins or polypeptides should function as amino acid sinks. Other methods for increasing amino acids such as lysine are disclosed in WO 95/15392, WO 96/38574, WO 89/11789 or WO 93/19190. In this cases speziell enzymes in the amino acid biosynthetic pathway such as the diphydrodipicolinic acid synthase are deregulated. This leads to an increase in the production of lysine in the different plants. Another approach to increase the level of amino acids in plants is disclosed in EP-A-0 271 408. EP-A-0 271 408 teaches the mutagenensis of plant and selection afterwards with inhibitors of certain enzymes of amino acid biosynthetic pathway.

[0019] Methods of recombinant DNA technology have also been used for some years to improve Corynebacterium strains producing L-amino acids by amplifying individual amino acid biosynthesis genes and investigating the effect on amino acid production.

[0020] As described above, the essential amino acids are necessary for humans and many mammals, for example for livestock. L-methionine is important as methyl group donor for the biosynthesis of, for example, choline, creatine, adrenaline, bases and RNA and DNA, histidine, and for the transmethylation following the formation of S-adenosylmethionine or as a sulfhydryl group donor for the formation of cysteine. Moreover, L-methionine appears to have a positive effect in depression.

[0021] Improving the quality of foodstuffs and animal feeds is an important task of the food-and-feed industry. This is necessary since, for example, certain amino acids, which occur in plants are limited with regard to the supply of mammals. Especially advantageous for the quality of foodstuffs and animal feeds is as balanced as possible an amino acid profile since a great excess of an amino acid above a specific concentration in the food has no further positive effect on the utilization of the food since other amino acids suddenly become limiting. A further increase in quality is only possible via addition of further amino acids, which are limiting under these conditions. The targeted addition of the limiting amino acid in the form of synthetic products must be carried out with extreme caution in order to avoid amino acid imbalance. For example, the addition of an essential amino acid stimulates protein digestion, which may cause deficiency situations for the second or third limiting amino acid, in particular. In feeding experiments, for example casein feeding experiments, the additional provision of methionine, which is limiting in casein, has revealed the fatty degeneration of liver, which could only be alleviated after the additional provision of tryptophan.

[0022] To ensure a high quality of foods and animal feeds, it is therefore necessary to add fine chemicals that means a plurality of compounds such as amino acids, vitamins, organic acids, PUFAS etc. in a balanced manner to suit the organism. Such supplemented food is named as “functional foods” or “nutraceuticals”. Nutraceuticals shall provide a health benefit to humans beyond basic nutrition. Functional foods have health-promoting or disease-preventing effects. Examples include omega-3 fatty acids (found in many fish, flaxseed oil, soybean oil, canola oil, and walnuts), which reduce risk of coronary heart disease and lycopene in tomatoes, which has been associated with reduced risk of certain cancers.

[0023] From a practical standpoint it would be of great advantage to produce an organism such as a microorganism or a plant containing a combination of different fine chemicals such as amino acids, vitamins, organic acids, carotenoids, PUFAS etc. at the same time in an sufficient amount to provide optimal growth and health benefit to animals or humans instead of combining different food or supplementing food or feed with different fine chemicals.

[0024] It is therefore an object of the present invention to develop an inexpensive process for the synthesis of a combination of fine chemicals such as amino acids like tryptophane, proline, arginine, phenylalanine, tyrosine, alanine, glycine, threonine, serine, valine, isoleucine or leucine especially essential amino acids such as tryptophane, arginine, phenylalanine, tyrosine, threonine, valine, isoleucine or leucine, carbohydrates such as raffinose, maltose or inositol, vitamins such as γ-, α- or β-tocopherol, organic acids such as ferulic acid, malate or sinapic acid, carotenoids such as β-carotene etc. at the same time in an sufficient amount to provide optimal growth and health benefit to animals or humans

[0025] It was now found that this object is achieved by providing the process according to the invention described herein and the embodiments characterized in the claims.

[0026] Accordingly, in a first embodiment, the invention relates to a process for the production of a fine chemical, whereby the fine chemical is at least one compound selected from the group consisting of tryptophane, proline, arginine, phenylalanine, tyrosine, alanine, glycine, threonine, serine, valine, isoleucine, leucine, raffinose, maltose, inositol, ferulic acid, malate, γ-tocopherol, α-tocopherol, β-tocopherol, cerotic acid, lignoceric acid, putrescine, sinapic acid, 3,4-dihydroxyphenylaline (=DOPA), stearic acid and β-carotene. Accordingly, in the present invention, the term “the fine chemical” as used herein relates to an amino acid selected from the group consisting of tryptophane, proline, arginine, phenylalanine, tyrosine, alanine, glycine, threonine, serine, valine, isoleucine and leucine; a vitamin selected from the group consisting of γ-tocopherol, α-tocopherol and β-tocopherol, a fatty acid selected from the group consisting of cerotic acid, lignoceric acid and stearic acid, an organic acid selected from the group consisting of ferulic acid, malate and sinapic acid or a compound selected from the group consisting of raffinose, putrescine, 3,4-dihydroxyphenylaline (=DOPA) and β-carotene or mixtures thereof containing at least two, three, four or five compounds selected from the aforementioned groups, preferably 6, 7, 8 or 9 compounds selected from the aforementioned groups, most preferably 10, 11, 12, 13, 14, 15, 16, 17 or more compounds selected from the aforementioned groups. Further, the term “the fine chemicals” as used herein also relates to fine chemicals comprising at least one compound selected from the group consisting of tryptophane, proline, arginine, phenylalanine, tyrosine, alanine, glycine, threonine, serine, valine, isoleucine, leucine, raffinose, maltose, inositol, ferulic acid, malate, γ-tocopherol, α-tocopherol, β-tocopherol, cerotic acid, lignoceric acid, putrescine, sinapic acid, 3,4-dihydroxyphenylaline (=DOPA), stearic acid and β-carotene.

[0027] In one embodiment, the term “the fine chemical” or “fine chemical” means at least one compound selected from the group consisting of L-tryptophane, L-proline, L-arginine, L-phenylalanine, L-tyrosine, L-alanine, glycine, L-threonine, L-serine, L-valine, L-isoleucine, L-leucine, raffinose, maltose, inositol, ferulic acid, malate, γ-tocopherol, α-tocopherol, β-tocopherol, cerotic acid, lignoceric acid, putrescine, sinapic acid, 3,4-dihydroxyphenylaline (=DOPA), stearic acid and β-carotene. Throughout the specification the term “the fine chemical” means the aforementioned compounds, its salts, ester or amids in free form or bound to other chemical compounds especially proteins. In a preferred embodiment, the term “the fine chemical” or “fine chemical” means at least one compound selected from the group consisting of L-tryptophane, L-proline, L-arginine, L-phenylalanine, L-tyrosine, L-alanine, glycine, L-threonine, L-serine, L-valine, L-isoleucine and L-leucine in free form or its salts or bound to proteins.

[0028] Accordingly, the present invention relates to a process for the production of fine chemical comprising
[0029] (a) increasing or generating the biological activity represented by a protein as depicted in SEQ ID NO: 2, 4, 6, 8, 10, 12, 14, 16, 18, 20, 22, 24, 26, 28, 30, 32, 34, 36, 38, 40, 42, 44, 46, 56, 58, 60, 62, 64, 66, 68, 70, 72, 74, 76, 78, 80, 82, 84, 86, 88, 90, 92, 94, 96, 98, 100, 102, 104, 106, 108, 110, 112, 114, 116, 118, 120, 122, 124, 126, 128, 130, 132, 134, 136, 138, 140, 142, 144, 146, 148, 150, 152, 154, 156, 158, 160, 162, 164, 166, 168, 170, 172, 174, 176, 178, 180, 182, 184, 186, 188, 190, 192, 194, 196, 198, 200, 202, 204, 206, 208, 210, 212, 214, 216, 218, 220, 222, 224, 226, 228, 230, 232, 234, 236, 238, 240, 242, 244, 246, 248, 250, 252, 254, 256, 258, 260, 262, 264, 266, 268, 270, 272, 274, 276, 278, 280, 282, 284, 286, 288, 290, 292, 294, 296, 298, 300, 302, 304, 306, 308, 310, 312, 314, 316, 318, 320, 322, 324, 326, 328, 330, 332, 334, 336, 338, 340, 342, 344, 346, 348, 350, 352, 354, 356, 358, 360, 362, 364, 366, 368, 370, 372, 374, 376, 378, 380, 382, 384, 386, 388, 390, 392 or 394 in a non-human organism, or in one or more parts thereof; and
[0030] (b) growing the organism under conditions which permit the production of the fine chemical in said organism.

[0031] Comprises/comprising and grammatical variations thereof when used in this specification are to be taken to specify the presence of stated features, integers, steps or components or groups thereof, but not to preclude the presence or addition of one or more other features, integers, steps, components or groups thereof.

[0032] Preferably, this process further comprises the step of recovering the fine chemical, which is synthesized by the organism from the organism and/or from the culture medium used for the growth or maintainance of the organism. The term “recovering” means the isolation of the fine chemical in different purities, that means on the one hand harvesting of the biological material, which contains the fine chemical without further purification and on the other hand purities of the fine chemical between 5% and 100% purity, preferred purities are in the range of 10% and 99%. In one embodiment, the purities are 20%, 30%, 40%, 50%, 60%, 70%, 80%, 90%, 95% or 99% or more.

[0033] Advantageously the process for the production of the fine chemical leads to an enhanced production of the fine chemical. The terms “enhanced” or “increase” mean at least a 10%, 20%, 30%, 40% or 50%, preferably at least 60%, 70%, 80%, 90% or 100%, more preferably 150%, 200%, 300%, 400% or 500% higher production of the fine chemical in comparison to the reference as defined below, e.g. that means in comparison to an organism without the aforementioned modification of the activity of a protein having the biological activity represented by a protein as depicted in SEQ ID NO: 2, 4, 6, 8, 10, 12, 14, 16, 18, 20, 22, 24, 26, 28, 30, 32, 34, 36, 38, 40, 42, 44, 46, 56, 58, 60, 62, 64, 66, 68, 70, 72, 74, 76, 78, 80, 82, 84, 86, 88, 90, 92, 94, 96, 98, 100, 102, 104, 106, 108, 110, 112, 114, 116, 118, 120, 122, 124, 126, 128, 130, 132, 134, 136, 138, 140, 142, 144, 146, 148, 150, 152, 154, 156, 158, 160, 162, 164, 166, 168, 170, 172, 174, 176, 178, 180, 182, 184, 186, 188, 190, 192, 194, 196, 198, 200, 202, 204, 206, 208, 210, 212, 214, 216, 218, 220, 222, 224, 226, 228, 230, 232, 234, 236, 238, 240, 242, 244, 246, 248, 250, 252, 254, 256, 258, 260, 262, 264, 266, 268, 270, 272, 274, 276, 278, 280, 282, 284, 286, 288, 290, 292, 294, 296, 298, 300, 302, 304, 306, 308, 310, 312, 314, 316, 318, 320, 322, 324, 326, 328, 330, 332, 334, 336, 338, 340, 342, 344, 346, 348, 350, 352, 354, 356, 358, 360, 362, 364, 366, 368, 370, 372, 374, 376, 378, 380, 382, 384, 386, 388, 390, 392 or 394.

[0034] Surprisingly it was found, that the transgenic expression of the Kluyveromyces lactis, Cryptococcus neoformans, Neurospora crassa, Penicillium marneffei, Mucor rouxii, Schizophyllum commune, Paracoccidioides brasiliensis, Aspergillus fumigatus, Suillus bovinus, Candida albicans, Trichoderma reesei, Ashbya gossypii, Yarrowia lipolytica, Ustilago maydis, Emericella nidulans, Trichomonas vaginalis, Colletotrichum trifolii, Blumeria graminis, Dictyostelium discoideum, Saccaromyces cerevisiae, Schizosaccharomyces pombe, Entamoeba histolytica, Oryza sativa, Brassica napus, Glycine max, Beta vulgaris, Lotus japonicus, Zinnia elegans, Zea mays, Cicer arietinum, Arabidopsis thaliana, Hordeum vulgare, Nicotiana tabacum, Gossypium hirsutum, Physcomitrella patens, Fucus distichus, Medicago truncutula, Homo sapiens, Caenorhabditits elegans, Tigriopus japonicus, Rhopalosiphum padi, Mus musculus, Discopyge ommata, Canis lupus, Drosophila melanogaster, Anopheles gambiae, Aplysia california, Ciona savignyi, Ciona intestinalis, Hemicentrotus pulcherrimus, Giardia lamblia, Gallus gallus, Brachydanio rerio, Xenopus laevis, Xenopus tropicalis, Schistosoma japonicum, Schistosoma mansoni, Encephalitozoon cuniculi, Wuchereria bancrofti, Cavia porcellus, Sus scrofa, Rattus norvegicus, Pneumocystis carinii or Pagrus major proteins as depicted in SEQ ID NO: 2, 4, 6, 8, 10, 12, 14, 16, 18, 20, 22, 24, 26, 28, 30, 32, 34, 36, 38, 40, 42, 44, 46, 56, 58, 60, 62, 64, 66, 68, 70, 72, 74, 76, 78, 80, 82, 84, 86, 88, 90, 92, 94, 96, 98, 100, 102, 104, 106, 108, 110, 112, 114, 116, 118, 120, 122, 124, 126, 128, 130, 132, 134, 136, 138, 140, 142, 144, 146, 148, 150, 152, 154, 156, 158, 160, 162, 164, 166, 168, 170, 172, 174, 176, 178, 180, 182, 184, 186, 188, 190, 192, 194, 196, 198, 200, 202, 204, 206, 208, 210, 212, 214, 216, 218, 220, 222, 224, 226, 228, 230, 232, 234, 236, 238, 240, 242, 244, 246, 248, 250, 252, 254, 256, 258, 260, 262, 264, 266, 268, 270, 272, 274, 276, 278, 280, 282, 284, 286, 288, 290, 292, 294, 296, 298, 300, 302, 304, 306, 308, 310, 312, 314, 316, 318, 320, 322, 324, 326, 328, 330, 332, 334, 336, 338, 340, 342, 344, 346, 348, 350, 352, 354, 356, 358, 360, 362, 364, 366, 368, 370, 372, 374, 376, 378, 380, 382, 384, 386, 388, 390, 392 or 394 for example in Arabidopsis thaliana conferred an increase in the fine chemical content of the transformed plants.

[0035] In accordance with the invention, the term “organism” as understood herein relates always to a non-human organism, in particular to an animal or plant organism or to a microorganism. Further, the term “animal” as understood herein relates always to a non-human animal.

[0036] The sequence depicted in SEQ ID NO: 1 (YNL090W) from Saccharomyces cerevisiae has been published in Madaule et al. [1987, “Characterization of two members of the rho gene family from the yeast Saccharomyces cerevisiae”; Proc. Natl. Acad. Sci., USA 84(3):779-83], and named as rho2. The gene encodes as all the other sequences mentioned above and use in the inventive process a non-essential GTPase of the rho/rac subfamily of the ras-like GTPases. The protein may play a role in the establishment of cell polarity or in microtubule assembly. Accordingly, in one embodiment, the process of the present invention comprises the use of a gene product “involved in in the establishment of cell polarity or in microtubule assembly” from Saccaromyces cerevisiae or its homolog, e.g. as shown herein, for the production of the fine chemical, meaning of preferably for the production of essential amino acids, in particular for increasing the amount of an essential amino acid in free or bound form in an organism or a part thereof, as mentioned herein. That means the increase of its biological activity by overexpression of the responsible gene leads to an increase of the fine chemical.

[0037] The term “biological activity” means the biological function of the protein of the invention. In contrast to the term “biological activity” the term “activity” means the increase in the production of the compound produced by the inventive process. The term “biological activity” preferably refers to for example the enzymatic function, transporter or carrier function, DNA-packaging function, heat shock protein function, recombination protein function or regulatory function of a peptide or protein in an organism, a tissue, a cell or a cell compartment. Suitable substrates are low-molecular-weight compounds and also the protein interaction partners of a protein. The term “increase” of the biological function refers, for example, to the increase in binding capacity or binding strength of a protein for at least one substrate in an organism, a tissue, a cell or a cell compartment—for example by one of the methods described herein below—in comparison with the wild type of the same genus and species to which this method has not been applied, under otherwise identical conditions (such as, for example, culture conditions, age of the plants and the like). Increase is also understood as meaning the modification of the substrate specificity as can be expressed for example, by the kcat/Km value. In this context, an increase of the function of at least 10%, advantageously of at least 20%, preferably at least 30%, especially preferably of at least 40%, 50%, 60%, 70%, 80%, 90% or more, very especially preferably of at least 150%, 200%, 250%, 300% or more, in comparison with the untreated organism is advantageous.

[0038] Homologues (=homologs) of the present gene products can be derived from any organisms as long as the homologue confers the herein mentioned activity, in particular, confers an increase in the fine chemical amount or content. Further, in the present invention, the term “homologue” relates to the sequence of an organism having the highest sequence homology to the herein mentioned or listed sequences of all expressed sequences of said organism. However, the person skilled in the art knows, that preferably, the homologue has said the fine chemical increasing activity and, if known, the same biological function or activity in the organism as the YNL090W protein as depicted in SEQ ID NO: 2. In one embodiment, the homolog of the SEQ ID NO: 2 is a homolog having said biological activity and being derived from Eukaryot such as plants like the families Anacardiaceae, Asteraceae, Apiaceae, Betulaceae, Boraginaceae, Brassicaceae, Bromeliaceae, Caricaceae, Cannabaceae, Convolvulaceae, Chenopodiaceae, Cucurbitaceae, Elaeagnaceae, Ericaceae, Euphorbiaceae, Fabaceae, Geraniaceae, Gramineae, Juglandaceae, Lauraceae, Leguminosae or Linaceae; algae, fungi or mosses. In another embodiment, the homolog of SEQ ID NO: 2 is a homolog having said activity and being derived from bacteria. In a further embodiment, the homolog of the SEQ ID NO: 2 is a homolog having said activity and being derived from fungi. I

[0039] Further homologs of are described herein below.

[0040] In accordance with the invention, a protein or polypeptide has the “the biological activity represented by a protein as depicted in SEQ ID NO: 2, 4, 6, 8, 10, 12, 14, 16, 18, 20, 22, 24, 26, 28, 30, 32, 34, 36, 38, 40, 42, 44, 46, 56, 58, 60, 62, 64, 66, 68, 70, 72, 74, 76, 78, 80, 82, 84, 86, 88, 90, 92, 94, 96, 98, 100, 102, 104, 106, 108, 110, 112, 114, 116, 118, 120, 122, 124, 126, 128, 130, 132, 134, 136, 138, 140, 142, 144, 146, 148, 150, 152, 154, 156, 158, 160, 162, 164, 166, 168, 170, 172, 174, 176, 178, 180, 182, 184, 186, 188, 190, 192, 194, 196, 198, 200, 202, 204, 206, 208, 210, 212, 214, 216, 218, 220, 222, 224, 226, 228, 230, 232, 234, 236, 238, 240, 242, 244, 246, 248, 250, 252, 254, 256, 258, 260, 262, 264, 266, 268, 270, 272, 274, 276, 278, 280, 282, 284, 286, 288, 290, 292, 294, 296, 298, 300, 302, 304, 306, 308, 310, 312, 314, 316, 318, 320, 322, 324, 326, 328, 330, 332, 334, 336, 338, 340, 342, 344, 346, 348, 350, 352, 354, 356, 358, 360, 362, 364, 366, 368, 370, 372, 374, 376, 378, 380, 382, 384, 386, 388, 390, 392 or 394” if its de novo activity, or its increased expression directly or indirectly leads to an increased the fine chemical level in the organism or a part thereof, preferably in a cell of said organism and the protein has the above mentioned activities of a protein as depicted in SEQ ID NO: 2, 4, 6, 8, 10, 12, 14, 16, 18, 20, 22, 24, 26, 28, 30, 32, 34, 36, 38, 40, 42, 44, 46, 56, 58, 60, 62, 64, 66, 68, 70, 72, 74, 76, 78, 80, 82, 84, 86, 88, 90, 92, 94, 96, 98, 100, 102, 104, 106, 108, 110, 112, 114, 116, 118, 120, 122, 124, 126, 128, 130, 132, 134, 136, 138, 140, 142, 144, 146, 148, 150, 152, 154, 156, 158, 160, 162, 164, 166, 168, 170, 172, 174, 176, 178, 180, 182, 184, 186, 188, 190, 192, 194, 196, 198, 200, 202, 204, 206, 208, 210, 212, 214, 216, 218, 220, 222, 224, 226, 228, 230, 232, 234, 236, 238, 240, 242, 244, 246, 248, 250, 252, 254, 256, 258, 260, 262, 264, 266, 268, 270, 272, 274, 276, 278, 280, 282, 284, 286, 288, 290, 292, 294, 296, 298, 300, 302, 304, 306, 308, 310, 312, 314, 316, 318, 320, 322, 324, 326, 328, 330, 332, 334, 336, 338, 340, 342, 344, 346, 348, 350, 352, 354, 356, 358, 360, 362, 364, 366, 368, 370, 372, 374, 376, 378, 380, 382, 384, 386, 388, 390, 392 or 394. During the specification the activity or preferably the biological activity of such a protein or polypeptide or an nucleic acid molecule or sequence encoding such protein or polypeptide is identical or similar if it still has the biological or enzymatic activity of a protein as depicted in SEQ ID NO: 2, 4, 6, 8, 10, 12, 14, 16, 18, 20, 22, 24, 26, 28, 30, 32, 34, 36, 38, 40, 42, 44, 46, 56, 58, 60, 62, 64, 66, 68, 70, 72, 74, 76, 78, 80, 82, 84, 86, 88, 90, 92, 94, 96, 98, 100, 102, 104, 106, 108, 110, 112, 114, 116, 118, 120, 122, 124, 126, 128, 130, 132, 134, 136, 138, 140, 142, 144, 146, 148, 150, 152, 154, 156, 158, 160, 162, 164, 166, 168, 170, 172, 174, 176, 178, 180, 182, 184, 186, 188, 190, 192, 194, 196, 198, 200, 202, 204, 206, 208, 210, 212, 214, 216, 218, 220, 222, 224, 226, 228, 230, 232, 234, 236, 238, 240, 242, 244, 246, 248, 250, 252, 254, 256, 258, 260, 262, 264, 266, 268, 270, 272, 274, 276, 278, 280, 282, 284, 286, 288, 290, 292, 294, 296, 298, 300, 302, 304, 306, 308, 310, 312, 314, 316, 318, 320, 322, 324, 326, 328, 330, 332, 334, 336, 338, 340, 342, 344, 346, 348, 350, 352, 354, 356, 358, 360, 362, 364, 366, 368, 370, 372, 374, 376, 378, 380, 382, 384, 386, 388, 390, 392 or 394, if it has at least 10% of the original biological or enzymatic activity, preferably 20%, particularly preferably 30%, most particularly preferably 40% in comparison to a protein as depicted in SEQ ID NO: 2, 4, 6, 8, 10, 12, 14, 16, 18, 20, 22, 24, 26, 28, 30, 32, 34, 36, 38, 40, 42, 44, 46, 56, 58, 60, 62, 64, 66, 68, 70, 72, 74, 76, 78, 80, 82, 84, 86, 88, 90, 92, 94, 96, 98, 100, 102, 104, 106, 108, 110, 112, 114, 116, 118, 120, 122, 124, 126, 128, 130, 132, 134, 136, 138, 140, 142, 144, 146, 148, 150, 152, 154, 156, 158, 160, 162, 164, 166, 168, 170, 172, 174, 176, 178, 180, 182, 184, 186, 188, 190, 192, 194, 196, 198, 200, 202, 204, 206, 208, 210, 212, 214, 216, 218, 220, 222, 224, 226, 228, 230, 232, 234, 236, 238, 240, 242, 244, 246, 248, 250, 252, 254, 256, 258, 260, 262, 264, 266, 268, 270, 272, 274, 276, 278, 280, 282, 284, 286, 288, 290, 292, 294, 296, 298, 300, 302, 304, 306, 308, 310, 312, 314, 316, 318, 320, 322, 324, 326, 328, 330, 332, 334, 336, 338, 340, 342, 344, 346, 348, 350, 352, 354, 356, 358, 360, 362, 364, 366, 368, 370, 372, 374, 376, 378, 380, 382, 384, 386, 388, 390, 392 or 394 of Kluyveromyces lactis, Cryptococcus neoformans, Neurospora crassa, Penicillium marneffei, Mucor rouxii, Schizophyllum commune, Paracoccidioides brasiliensis, Aspergillus fumigatus, Suillus bovinus, Candida albicans, Trichoderma reesei, Ashbya gossypii, Yarrowia lipolytica, Ustilago maydis, Emericella nidulans, Trichomonas vaginalis, Colletotrichum trifolii, Blumeria graminis, Dictyostelium discoideum, Saccaromyces cerevisiae, Schizosaccharomyces pombe, Entamoeba histolytica, Oryza sativa, Brassica napus, Glycine max, Beta vulgaris, Lotus japonicus, Zinnia elegans, Zea mays, Cicer arietinum, Arabidopsis thaliana, Hordeum vulgare, Nicotiana tabacum, Gossypium hirsutum, Physcomitrella patens, Fucus distichus, Medicago truncutula, Homo sapiens, Caenorhabditits elegans, Tigriopus japonicus, Rhopalosiphum padi, Mus musculus, Discopyge ommata, Canis lupus, Drosophila melanogaster, Anopheles gambiae, Aplysia california, Ciona savignyi, Ciona intestinalis, Hemicentrotus pulcherrimus, Giardia lamblia, Gallus gallus, Brachydanio rerio, Xenopus laevis, Xenopus tropicalis, Schistosoma japonicum, Schistosoma mansoni, Encephalitozoon cuniculi, Wuchereria bancrofti, Cavia porcellus, Sus scrofa and/or Pagrus major.

[0041] The terms “increased”, “rised”, “extended”, “enhanced”, “improved” or “amplified” relate to a corresponding change of a property in an organism, a part of an organism such as a tissue, seed, root, leave, flower etc. or in a cell and are interchangeable. Preferably, the overall activity in the volume is increased or enhanced in cases if the increase or enhancement is related to the increase or enhancement of an activity of a gene product, independent whether the amount of gene product or the specific activity of the gene product or both is increased or enhanced or whether the amount, stability or translation efficacy of the nucleic acid sequence or gene encoding for the gene product is increased or enhanced. The terms “reduction”, “decrease” or “deletion” relate to a corresponding change of a property in, an organism, a part of an organism such as a tissue, seed, root, leave, flower etc. or in a cell. Preferably, the overall activity in the volume is reduced, decreased or deleted in cases if the reduction, decrease or deletion is related to the reduction, decrease or deletion of an activity of a gene product, independent whether the amount of gene product or the specific activity of the gene product or both is reduced, decreased or deleted or whether the amount, stability or translation efficacy of the nucleic acid sequence or gene encoding for the gene product is reduced, decreased or deleted.

[0042] The terms “increase” or “decrease” relate to a corresponding change of a property an organism or in a part of an organism, such as a tissue, seed, root, leave, flower etc. or in a cell. Preferably, the overall activity in the volume is increased in cases the increase relates to the increase of an activity of a gene product, independent whether the amount of gene product or the specific activity of the gene product or both is increased or generated or whether the amount, stability or translation efficacy of the nucleic acid sequence or gene encoding for the gene product is increased.

[0043] Under “change of a property” it is understood that the activity, expression level or amount of a gene product or the metabolite content is changed in a specific volume relative to a corresponding volume of a control, reference or wild type, including the de novo creation of the activity or expression.

[0044] The terms “increase” or “decrease” include the change of said property in only parts of the subject of the present invention, for example, the modification can be found in compartment of a cell, like a organelle, or in a part of a plant, like tissue, seed, root, leave, flower etc. but is not detectable if the overall subject, i.e. complete cell or plant, is tested. Preferably, the increase or decrease is found cellular, thus the term “increase of an activity” or “increase of a metabolite content” relates to the cellular increase compared to the wild typ cell. Typically said increase is based on the higher content of the transcribed nucleic acid or the protein translated from said nucleic acid sequence in the modified cell in comparison to the wild type cell.

[0045] Accordingly, the term “increase” or “decrease” means that the specific activity of an enzyme as well as the amount of a compound or metabolite, e.g. of a polypeptide, a nucleic acid molelcule or of the fine chemical of the invention or an encoding mRNA or DNA, can be increased or decreased in a volume.

[0046] The terms “wild type”, “control” or “reference” are exchangeable and can be a cell or a part of organisms such as an organelle or a tissue, or an organism, in particular a microorganism or a plant, which was not modified or treated according to the herein described process according to the invention. Accordingly, the cell or a part of organisms such as an organelle or a tissue, or an organism, in particular a microorganism or a plant used as wild typ, control or reference corresponds to the cell, organism or part thereof as much as possible and is in any other property but in the result of the process of the invention as identical to the subject matter of the invention as possible. Thus, the wild type, control or reference is treated identically or as identical as possible, saying that only conditions or properties might be different which do not influence the quality of the tested property.

[0047] Preferably, any comparison is carried out under analogous conditions. The term “analogous conditions” means that all conditions such as, for example, culture or growing conditions, assay conditions (such as buffer composition, temperature, substrates, pathogen strain, concentrations and the like) are kept identical between the experiments to be compared.

[0048] The “reference”, “control”, or “wild type” is preferably a subject, e.g. an organelle, a cell, a tissue, an organism, in particular a plant or a microorganism, which was not modified or treated according to the herein described process of the invention and is in any other property as similar to the subject matter of the invention as possible. The reference, control or wild type is in its genome, transcriptome, proteome or meta-bolome as similar as possible to the subject of the present invention. Preferably, the term “reference-” “control-” or “wild type-”-organelle, -cell, -tissue or -organism, in particular plant or microorganism, relates to an organelle, cell, tissue or organism, in particular plant or micororganism, which is nearly genetically identical to the organelle, cell, tissue or organism, in particular microorganism or plant, of the present invention or a part thereof preferably 95%, more peferred are 98%, even more preferred are 99.00%, in particular 99.10%, 99.30%, 99.50%, 99.70%, 99.90%, 99.99%, 99.999% or more. Most preferable the “reference”, “control”, or “wild type” is a subject, e.g. an organelle, a cell, a tissue, an organism, which is genetically identical to the organism, cell or organelle used according to the process of the invention except that the responsible or acvitivity conferring nucleic acid molecules or the gene product encoded by them are amended, manipulated, exchanged or introduced according to the inventive process.

[0049] Preferably, the reference, control or wild type differs form the subject of the present invention only in the cellular activity of the polypeptide of the invention, e.g. as result of an increase in the level of the nucleic acid molecule of the present invention or an increase of the specific activity of the polypeptide of the invention, e.g. by or in the expression level or activity of an protein having the biological activity represented by a protein as depicted in SEQ ID NO: 2, 4, 6, 8, 10, 12, 14, 16, 18, 20, 22, 24, 26, 28, 30, 32, 34, 36, 38, 40, 42, 44, 46, 56, 58, 60, 62, 64, 66, 68, 70, 72, 74, 76, 78, 80, 82, 84, 86, 88, 90, 92, 94, 96, 98, 100, 102, 104, 106, 108, 110, 112, 114, 116, 118, 120, 122, 124, 126, 128, 130, 132, 134, 136, 138, 140, 142, 144, 146, 148, 150, 152, 154, 156, 158, 160, 162, 164, 166, 168, 170, 172, 174, 176, 178, 180, 182, 184, 186, 188, 190, 192, 194, 196, 198, 200, 202, 204, 206, 208, 210, 212, 214, 216, 218, 220, 222, 224, 226, 228, 230, 232, 234, 236, 238, 240, 242, 244, 246, 248, 250, 252, 254, 256, 258, 260, 262, 264, 266, 268, 270, 272, 274, 276, 278, 280, 282, 284, 286, 288, 290, 292, 294, 296, 298, 300, 302, 304, 306, 308, 310, 312, 314, 316, 318, 320, 322, 324, 326, 328, 330, 332, 334, 336, 338, 340, 342, 344, 346, 348, 350, 352, 354, 356, 358, 360, 362, 364, 366, 368, 370, 372, 374, 376, 378, 380, 382, 384, 386, 388, 390, 392 or 394 or its homologs, its biochemical or genetical causes and the increased amount of the fine chemical.

[0050] In case, a control, reference or wild type differing from the subject of the present invention only by not being subject of the process of the invention can not be provided, a control, reference or wild type can be an organism in which the cause for the modulation of an activity conferring the increase of the fine chemical or expression of the nucleic acid molecule of the invention as described herein has been switched back or off, e.g. by knocking out the expression of responsible gene product, e.g. by antisense inhibition, by inactivation of an activator or agonist, by activation of an inhibitor or antagonist, by inhibition through adding inhibitory antibodies, by adding active compounds as e.g. hormones, by introducing negative dominant mutants, etc. A gene production can for example be knocked out by introducing inactivating point mutations, which lead to an enzymatic activity inhibition or a destabilization or an inhibition of the ability to bind to cofactors etc.

[0051] Accordingly, preferred reference subject is the starting subject of the present process of the invention. Preferably, the reference and the subject matter of the invention are compared after standardization and normalization, e.g. to the amount of total RNA, DNA, or protein or activity or expression of reference genes, like housekeeping genes, such as ubiquitin, actin or ribosomal proteins.

[0052] A series of mechanisms exists via which a modification of the a protein, e.g. the polypeptide of the invention can directly or indirectly affect the yield, production and/or production efficiency of the amino acid.

[0053] For example, the molecule number or the specific activity of the polypeptide or the nucleic acid molecule may be increased. Larger amounts of the fine chemical can be produced if the polypeptide or the nucleic acid of the invention is expressed de novo in an organism lacking the activity of said protein. However, it is also possible to increase the expression of the gene which is naturally present in the organisms, for example by modifying the regulation of the gene, or by increasing the stability of the corresponding mRNA or of the corresponding gene product encoded by the nucleic acid molecule of the invention, or by introducing homologous genes from other organisms which are differently regulated, eg. not feedback sensitive or not feedback regulated.

[0054] This also applies analogously to the combined increased expression of the nucleic acid molecule of the present invention or its gene product with that of further enzymes of the biochemical pathway of the fine chemical e.g. of the amino acid biosynthesis pathway, e.g. which are useful for the synthesis of the fine chemicals.

[0055] The increase, decrease or modulation according to this invention can be constitutive, e.g. due to a stable permanent transgenic expression or to a stable mutation in the corresponding endogenous gene encoding the nucleic acid molecule of the invention or to a modulation of the expression or of the behaviour of a gene conferring the expression of the polypeptide of the invention, or transient, e.g. due to an transient transformation or temporary addition of a modulator such as a agonist or antagonist or inducible, e.g. after transformation with a inducible construct carrying the nucleic acid molecule of the invention under control of a induceable promoter and adding the inducer, e.g. tetracycline or as described herein below.

[0056] The increase in activity of the polypeptide amounts in a cell, a tissue, a organelle, an organ or an organism or a part thereof preferably to at least 5%, preferably to at least 20% or at to least 50%, especially preferably to at least 70%, 80%, 90% or more, very especially preferably are to at least 200%, 300% or 400%, most preferably are to at least 500%, 600% or more in comparison to the control, reference or wild type.

[0057] The specific activity of a polypeptide encoded by a nucleic acid molecule of the present invention or of the polypeptide of the present invention can be tested as described in the examples. In particular, the expression of a protein in question in a cell, e.g. a plant cell or a microorganism and the detection of an increase the fine chemical level in comparison to a control is an easy test and can be performed as described in the state of the art.

[0058] The term “increase” includes, that a compound or an activity is introduced into a cell de novo or that the compound or the activity has not been detectable before, in other words it is “generated”.

[0059] Accordingly, in the following, the term “increasing” also comprises the term “generating” or “stimulating”. The increased activity manifests itself in an increase of the fine chemical.

[0060] In case the biological activity of the Saccaromyces cerevisiae protein YNL090W as depicted in SEQ ID NO: 2, or the biological activity of the of Kluyveromyces lactis, Cryptococcus neoformans, Neurospora crassa, Penicillium marneffei, Mucor rouxii, Schizophyllum commune, Paracoccidioides brasiliensis, Aspergillus fumigatus, Suillus bovinus, Candida albicans, Trichoderma reesei, Ashbya gossypii, Yarrowia lipolytica, Ustilago maydis, Emericella nidulans, Trichomonas vaginalis, Colletotrichum trifolii, Blumeria graminis, Dictyostelium discoideum, Schizosaccharomyces pombe, Entamoeba histolytica, Oryza sativa, Brassica napus, Glycine max, Beta vulgaris, Lotus japonicus, Zinnia elegans, Zea mays, Cicer arietinum, Arabidopsis thaliana, Hordeum vulgare, Nicotiana tabacum, Gossypium hirsutum, Physcomitrella patens, Fucus distichus, Medicago truncutula, Homo sapiens, Caenorhabditits elegans, Tigriopus japonicus, Rhopalosiphum padi, Mus musculus, Discopyge ommata, Canis lupus, Drosophila melanogaster, Anopheles gambiae, Aplysia california, Ciona savignyi, Ciona intestinalis, Hemicentrotus pulcherrimus, Giardia lamblia, Gallus gallus, Brachydanio rerio, Xenopus laevis, Xenopus tropicalis, Schistosoma japonicum, Schistosoma mansoni, Encephalitozoon cuniculi, Wuchereria bancrofti, Cavia porcellus, Sus scrofa, Rattus norvegicus, Pneumocystis carinii or Pagrus major proteins as depicted SEQ ID NO: 4, 6, 8, 10, 12, 14, 16, 18, 20, 22, 24, 26, 28, 30, 32, 34, 36, 38, 40, 42, 44, 46, 56, 58, 60, 62, 64, 66, 68, 70, 72, 74, 76, 78, 80, 82, 84, 86, 88, 90, 92, 94, 96, 98, 100, 102, 104, 106, 108, 110, 112, 114, 116, 118, 120, 122, 124, 126, 128, 130, 132, 134, 136, 138, 140, 142, 144, 146, 148, 150, 152, 154, 156, 158, 160, 162, 164, 166, 168, 170, 172, 174, 176, 178, 180, 182, 184, 186, 188, 190, 192, 194, 196, 198, 200, 202, 204, 206, 208, 210, 212, 214, 216, 218, 220, 222, 224, 226, 228, 230, 232, 234, 236, 238, 240, 242, 244, 246, 248, 250, 252, 254, 256, 258, 260, 262, 264, 266, 268, 270, 272, 274, 276, 278, 280, 282, 284, 286, 288, 290, 292, 294, 296, 298, 300, 302, 304, 306, 308, 310, 312, 314, 316, 318, 320, 322, 324, 326, 328, 330, 332, 334, 336, 338, 340, 342, 344, 346, 348, 350, 352, 354, 356, 358, 360, 362, 364, 366, 368, 370, 372, 374, 376, 378, 380, 382, 384, 386, 388, 390, 392 or 394 or its homologs is increased, preferably, in one embodment an increase of the fine chemical of at least 100%, 150%, or preferably to at least 200%, 250%, 300%, 350% or 400%, especially prerferably to at least 450%, 500%, 550%, 600% or more is conferred.

[0061] In case the biological activity of the Saccaromyces cerevisiae protein YNL090W as depicted in SEQ ID NO: 2, or the biological activity of the Kluyveromyces lactis, Cryptococcus neoformans, Neurospora crassa, Penicillium marneffei, Mucor rouxii, Schizophyllum commune, Paracoccidioides brasiliensis, Aspergillus fumigatus, Suillus bovinus, Candida albicans, Trichoderma reesei, Ashbya gossypii, Yarrowia lipolytica, Ustilago maydis, Emericella nidulans, Trichomonas vaginalis, Colletotrichum trifolii, Blumeria graminis, Dictyostelium discoideum, Schizosaccharomyces pombe, Entamoeba histolytica, Oryza sativa, Brassica napus, Glycine max, Beta vulgaris, Lotus japonicus, Zinnia elegans, Zea mays, Cicer arietinum, Arabidopsis thaliana, Hordeum vulgare, Nicotiana tabacum, Gossypium hirsutum, Physcomitrella patens, Fucus distichus, Medicago truncutula, Homo sapiens, Caenorhabditits elegans, Tigriopus japonicus, Rhopalosiphum padi, Mus musculus, Discopyge ommata, Canis lupus, Drosophila melanogaster, Anopheles gambiae, Aplysia califomia, Ciona savignyi, Ciona intestinalis, Hemicentrotus pulcherrimus, Giardia lamblia, Gallus gallus, Brachydanio rerio, Xenopus laevis, Xenopus tropicalis, Schistosoma japonicum, Schistosoma mansoni, Encephalitozoon cuniculi, Wuchereria bancrofti, Cavia porcellus, Sus scrofa, Rattus norvegicus, Pneumocystis carinii or Pagrus major proteins as depicted SEQ ID NO: 4, 6, 8, 10, 12, 14, 16, 18, 20, 22, 24, 26, 28, 30, 32, 34, 36, 38, 40, 42, 44, 46, 56, 58, 60, 62, 64, 66, 68, 70, 72, 74, 76, 78, 80, 82, 84, 86, 88, 90, 92, 94, 96, 98, 100, 102, 104, 106, 108, 110, 112, 114, 116, 118, 120, 122, 124, 126, 128, 130, 132, 134, 136, 138, 140, 142, 144, 146, 148, 150, 152, 154, 156, 158, 160, 162, 164, 166, 168, 170, 172, 174, 176, 178, 180, 182, 184, 186, 188, 190, 192, 194, 196, 198, 200, 202, 204, 206, 208, 210, 212, 214, 216, 218, 220, 222, 224, 226, 228, 230, 232, 234, 236, 238, 240, 242, 244, 246, 248, 250, 252, 254, 256, 258, 260, 262, 264, 266, 268, 270, 272, 274, 276, 278, 280, 282, 284, 286, 288, 290, 292, 294, 296, 298, 300, 302, 304, 306, 308, 310, 312, 314, 316, 318, 320, 322, 324, 326, 328, 330, 332, 334, 336, 338, 340, 342, 344, 346, 348, 350, 352, 354, 356, 358, 360, 362, 364, 366, 368, 370, 372, 374, 376, 378, 380, 382, 384, 386, 388, 390, 392 or 394 or its homologs is increased, preferably, an increase of the fine chemical in conferred, preferably of the fine chemical such as essential amino acids e.g. tryptophane, arginine, phenylalanine, tyrosine, threonine, valine, isoleucine and/or leucine, non-essential amino acids e.g. proline, alanine, glycine or serine, modified amino acids e.g. 3,4-dihydroxyphenylalanine, carbohydrates e.g. raffinose, inositol or iso-maltose, vitamins e.g. α-tocopherol, β-tocopherol or γ-tocopherol, organic acids e.g. ferulic acid, sinapic acid or malate, fatty acids e.g. cerotic acid, lignoceric acid, 2-hydroxy-palmitic acid or stearic acid, carotinoids e.g. β-carotene or mixtures thereof is conferred.

[0062] In this context, the fine chemical amount in a cell, preferably in a tissue, more preferred in a organism as a plant or a microorganim or part thereof, is increased by at least 3%, 4%, 5%, 6%, 7%, 8% or 9% or more, especially preferably are at least 10%, 20%, 40%, 50% or more, very especially preferably are more than 60%, 70%, 80%, 90%, 100% or more and most preferably are 150% or more, such as 200%, 250%, 300%, 350%, 400%, 450%, 500%, 550% or 600%.

[0063] The fine chemical can be contained in the organism either in its free form and/or bound to proteins, polypeptids or other compounds such as polysaccharides, lipids, glycoproteins or glycolipids etc. or mixtures thereof. Accordingly, in one embodiment, the amount of the free form in a cell, preferably in a tissue, more preferred in a organism as a plant or a microorganim or part thereof, is increased by at least 3%, 4%, 5%, 6%, 7%, 8% or 9% or more, especially preferably are at least 10%, 20%, 40%, 50% or more, very especially preferably are more than 60%, 70%, 80%, 90%, 100% or more and most preferably are 150% or more, such as 200%, 250%, 300%, 350%, 400%, 450%, 500%, 550% or 600%. Accordingly, in an other embodiment, the amount of the bound the fine chemical in a cell, preferably in a tissue, more preferred in a organism as a plant or a microorganism or part thereof, is increased by at least 3%, 4%, 5%, 6%, 7%, 8% or 9% or more, especially preferably are at least 10%, 20%, 40%, 50% or more, very especially preferably are more than 60%, 70%, 80%, 90%, 100% or more and most preferably are 150% or more, such as 200%, 250%, 300%, 350%, 400%, 450%, 500%, 550% or 600%.

[0064] A protein having an activity conferring an increase in the amount or level of the fine chemical preferably has the structure of the polypeptide described herein, in particular of the polypeptides comprising the consensus sequence shown in SEQ ID NO: 47, SEQ ID NO: 48, SEQ ID NO: 49, SEQ ID NO: 50, SEQ ID NO: 51, SEQ ID NO: 52, SEQ ID NO: 397, SEQ ID NO: 398, SEQ ID NO: 399 and/or SEQ ID NO: 400 as described herein, or is encoded by the nucleic acid molecule characterized herein or the nucleic acid molecule according to the invention, for example by the nucleic acid molecule as shown in SEQ ID NO: 1, 3, 5, 7, 9, 11, 13, 15, 17, 19, 21, 23, 25, 27, 29, 31, 33, 35, 37, 39, 41, 43, 45, 55, 57, 59, 61, 63, 65, 67, 69, 71, 73, 75, 77, 79, 81, 83, 85, 87, 89, 91, 93, 95, 97, 99, 101, 103, 105, 107, 109, 111, 113, 115, 117, 119, 121, 123, 125, 127, 129, 131, 133, 135, 137, 139, 141, 143, 145, 147, 149, 151, 153, 155, 157, 159, 161, 163, 165, 167, 169, 171, 173, 175, 177, 179, 181, 183, 185, 187, 189, 191, 193, 195, 197, 199, 201, 203, 205, 207, 209, 211, 213, 215, 217, 219, 221, 223, 225, 227, 229, 231, 233, 235, 237, 239, 241, 243, 245, 247, 249, 251, 253, 255, 257, 259, 261, 263, 265, 267, 269, 271, 273, 275, 277, 279, 281, 283, 285, 287, 289, 291, 293, 295, 297, 299, 301, 303, 305, 307, 309, 311, 313, 315, 317, 319, 321, 323, 325, 327, 329, 331, 333, 335, 337, 339, 341, 343, 345, 347, 349, 351, 353, 355, 357, 359, 361, 363, 365, 367, 369, 371, 373, 375, 377, 379, 381, 383, 385, 387, 389, 391 or 393 or its herein described functional homologues and has the herein mentioned activity.

[0065] For the purposes of the present invention, the terms “the fine chemical” or “fine chemical” such as essential amino acids e.g. tryptophane, arginine, phenylalanine, tyrosine, threonine, valine, isoleucine and/or leucine, non-essential amino acids e.g. proline, alanine, glycine or serine, modified amino acids e.g. 3,4-dihydroxyphenylalanine, carbohydrates e.g. raffinose, inositol or iso-maltose, vitamins e.g. α-tocopherol, β-tocopherol or γ-tocopherol, organic acids e.g. ferulic acid, sinapic acid or malate, fatty acids e.g. cerotic acid, lignoceric acid, 2-hydroxy-palmitic acid or stearic acid, carotinoids e.g. β-carotene or mixtures thereof also encompass the corresponding salts, such as, for example, tryptophane hydrochloride, arginine hydrochloride, phenylalanine hydrochloride, tyrosine hydrochloride, threonine hydrochloride, valine hydrochloride, isoleucine hydrochloride or leucine hydrochloride or tryptophane sulfate, arginine sulfate, phenylalanine sulfate, tyrosine sulfate, threonine sulfate, valine sulfate, isoleucine sulfate or leucine sulfate; ester or amids.

[0066] Owing to the biological activity of the proteins which are used in the process according to the invention and which are encoded by nucleic acid molecules according to the invention, it is possible to produce compositions comprising the fine chemical, i.e. an increased amount of the free chemical free or bound, e.g amino acid compositions. Depending on the choice of the organism used for the process according to the present invention, for example a microorganism or a plant, compositions or mixtures of various fine chemicals e.g. amino acids can be produced.

[0067] The term “expression” refers to the transcription and/or translation of a codogenic gene segment or gene. As a rule, the resulting product is an mRNA or a protein. However, expression products can also include functional RNAs such as, for example, antisense, nucleic acids, tRNAs, snRNAs, rRNAs, RNAi, siRNA, ribozymes etc. Expression may be systemic, local or temporal, for example limited to certain cell types, tissuesorgans or time periods.

[0068] In one embodiment, the process of the present invention comprises one or more of the following steps:
[0069] a) stabilizing a protein conferring the increased expression of a protein encoded by the nucleic acid molecule of the invention or of the protein of the invention, e.g. of a protein having the biological activity represented by a protein as depicted in SEQ ID NO: 2, 4, 6, 8, 10, 12, 14, 16, 18, 20, 22, 24, 26, 28, 30, 32, 34, 36, 38, 40, 42, 44, 46, 56, 58, 60, 62, 64, 66, 68, 70, 72, 74, 76, 78, 80, 82, 84, 86, 88, 90, 92, 94, 96, 98, 100, 102, 104, 106, 108, 110, 112, 114, 116, 118, 120, 122, 124, 126, 128, 130, 132, 134, 136, 138, 140, 142, 144, 146, 148, 150, 152, 154, 156, 158, 160, 162, 164, 166, 168, 170, 172, 174, 176, 178, 180, 182, 184, 186, 188, 190, 192, 194, 196, 198, 200, 202, 204, 206, 208, 210, 212, 214, 216, 218, 220, 222, 224, 226, 228, 230, 232, 234, 236, 238, 240, 242, 244, 246, 248, 250, 252, 254, 256, 258, 260, 262, 264, 266, 268, 270, 272, 274, 276, 278, 280, 282, 284, 286, 288, 290, 292, 294, 296, 298, 300, 302, 304, 306, 308, 310, 312, 314, 316, 318, 320, 322, 324, 326, 328, 330, 332, 334, 336, 338, 340, 342, 344, 346, 348, 350, 352, 354, 356, 358, 360, 362, 364, 366, 368, 370, 372, 374, 376, 378, 380, 382, 384, 386, 388, 390, 392 or 394 or its homologs having the fine chemical increasing activity;
[0070] b) stabilizing a mRNA conferring the increased expression of a protein encoded by the nucleic acid molecule of the invention, e.g. of a protein having the biological activity represented by a protein as depicted in SEQ ID NO: 2, 4, 6, 8, 10, 12, 14, 16, 18, 20, 22, 24, 26, 28, 30, 32, 34, 36, 38, 40, 42, 44, 46, 56, 58, 60, 62, 64, 66, 68, 70, 72, 74, 76, 78, 80, 82, 84, 86, 88, 90, 92, 94, 96, 98, 100, 102, 104, 106, 108, 110, 112, 114, 116, 118, 120, 122, 124, 126, 128, 130, 132, 134, 136, 138, 140, 142, 144, 146, 148, 150, 152, 154, 156, 158, 160, 162, 164, 166, 168, 170, 172, 174, 176, 178, 180, 182, 184, 186, 188, 190, 192, 194, 196, 198, 200, 202, 204, 206, 208, 210, 212, 214, 216, 218, 220, 222, 224, 226, 228, 230, 232, 234, 236, 238, 240, 242, 244, 246, 248, 250, 252, 254, 256, 258, 260, 262, 264, 266, 268, 270, 272, 274, 276, 278, 280, 282, 284, 286, 288, 290, 292, 294, 296, 298, 300, 302, 304, 306, 308, 310, 312, 314, 316, 318, 320, 322, 324, 326, 328, 330, 332, 334, 336, 338, 340, 342, 344, 346, 348, 350, 352, 354, 356, 358, 360, 362, 364, 366, 368, 370, 372, 374, 376, 378, 380, 382, 384, 386, 388, 390, 392 or 394 or its homologs or of an mRNA encoding the polypeptide of the present invention having the fine chemical increasing activity;
[0071] c) increasing the specific activity of a protein conferring the increased expression of a protein encoded by the nucleic acid molecule of the invention or of the protein of the invention having the fine chemical increasing activity, e.g. of a protein having the biological activity represented by a protein as depicted in SEQ ID NO: 2, 4, 6, 8, 10, 12, 14, 16, 18, 20, 22, 24, 26, 28, 30, 32, 34, 36, 38, 40, 42, 44, 46, 56, 58, 60, 62, 64, 66, 68, 70, 72, 74, 76, 78, 80, 82, 84, 86, 88, 90, 92, 94, 96, 98, 100, 102, 104, 106, 108, 110, 112, 114, 116, 118, 120, 122, 124, 126, 128, 130, 132, 134, 136, 138, 140, 142, 144, 146, 148, 150, 152, 154, 156, 158, 160, 162, 164, 166, 168, 170, 172, 174, 176, 178, 180, 182, 184, 186, 188, 190, 192, 194, 196, 198, 200, 202, 204, 206, 208, 210, 212, 214, 216, 218, 220, 222, 224, 226, 228, 230, 232, 234, 236, 238, 240, 242, 244, 246, 248, 250, 252, 254, 256, 258, 260, 262, 264, 266, 268, 270, 272, 274, 276, 278, 280, 282, 284, 286, 288, 290, 292, 294, 296, 298, 300, 302, 304, 306, 308, 310, 312, 314, 316, 318, 320, 322, 324, 326, 328, 330, 332, 334, 336, 338, 340, 342, 344, 346, 348, 350, 352, 354, 356, 358, 360, 362, 364, 366, 368, 370, 372, 374, 376, 378, 380, 382, 384, 386, 388, 390, 392 or 394 or its homologs, or decreasing the inhibitiory regulation of the protein of the invention;
[0072] d) generating or increasing the expression of an endogenous or artificial transcription factor mediating the expression of a protein conferring the increased expression of a protein encoded by the nucleic acid molecule of the invention or of the protein of the invention having the fine chemical increasing activity, e.g. of a polypeptide having the biological activity represented by a protein as depicted in SEQ ID NO: 2, 4, 6, 8, 10, 12, 14, 16, 18, 20, 22, 24, 26, 28, 30, 32, 34, 36, 38, 40, 42, 44, 46, 56, 58, 60, 62, 64, 66, 68, 70, 72, 74, 76, 78, 80, 82, 84, 86, 88, 90, 92, 94, 96, 98, 100, 102, 104, 106, 108, 110, 112, 114, 116, 118, 120, 122, 124, 126, 128, 130, 132, 134, 136, 138, 140, 142, 144, 146, 148, 150, 152, 154, 156, 158, 160, 162, 164, 166, 168, 170, 172, 174, 176, 178, 180, 182, 184, 186, 188, 190, 192, 194, 196, 198, 200, 202, 204, 206, 208, 210, 212, 214, 216, 218, 220, 222, 224, 226, 228, 230, 232, 234, 236, 238, 240, 242, 244, 246, 248, 250, 252, 254, 256, 258, 260, 262, 264, 266, 268, 270, 272, 274, 276, 278, 280, 282, 284, 286, 288, 290, 292, 294, 296, 298, 300, 302, 304, 306, 308, 310, 312, 314, 316, 318, 320, 322, 324, 326, 328, 330, 332, 334, 336, 338, 340, 342, 344, 346, 348, 350, 352, 354, 356, 358, 360, 362, 364, 366, 368, 370, 372, 374, 376, 378, 380, 382, 384, 386, 388, 390, 392 or 394 or its homologs;
[0073] e) stimulating activity of a protein conferring the increased expression of a protein encoded by the nucleic acid molecule of the present invention or a protein of the present invention having the fine chemical increasing activity, e.g. of a protein having the biological activity represented by a protein as depicted in SEQ ID NO: 2, 4, 6, 8, 10, 12, 14, 16, 18, 20, 22, 24, 26, 28, 30, 32, 34, 36, 38, 40, 42, 44, 46, 56, 58, 60, 62, 64, 66, 68, 70, 72, 74, 76, 78, 80, 82, 84, 86, 88, 90, 92, 94, 96, 98, 100, 102, 104, 106, 108, 110, 112, 114, 116, 118, 120, 122, 124, 126, 128, 130, 132, 134, 136, 138, 140, 142, 144, 146, 148, 150, 152, 154, 156, 158, 160, 162, 164, 166, 168, 170, 172, 174, 176, 178, 180, 182, 184, 186, 188, 190, 192, 194, 196, 198, 200, 202, 204, 206, 208, 210, 212, 214, 216, 218, 220, 222, 224, 226, 228, 230, 232, 234, 236, 238, 240, 242, 244, 246, 248, 250, 252, 254, 256, 258, 260, 262, 264, 266, 268, 270, 272, 274, 276, 278, 280, 282, 284, 286, 288, 290, 292, 294, 296, 298, 300, 302, 304, 306, 308, 310, 312, 314, 316, 318, 320, 322, 324, 326, 328, 330, 332, 334, 336, 338, 340, 342, 344, 346, 348, 350, 352, 354, 356, 358, 360, 362, 364, 366, 368, 370, 372, 374, 376, 378, 380, 382, 384, 386, 388, 390, 392 or 394 or its homologs, by adding one or more exogenous inducing factors to the organismus or parts thereof;
[0074] f) expressing a transgenic gene encoding a protein conferring the increased expression of a polypeptide (=protein) encoded by the nucleic acid molecule or the protein of the invention, having the fine chemical increasing activity, e.g. of a protein having the biological activity represented by a protein as depicted in SEQ ID NO: 2, 4, 6, 8, 10, 12, 14, 16, 18, 20, 22, 24, 26, 28, 30, 32, 34, 36, 38, 40, 42, 44, 46, 56, 58, 60, 62, 64, 66, 68, 70, 72, 74, 76, 78, 80, 82, 84, 86, 88, 90, 92, 94, 96, 98, 100, 102, 104, 106, 108, 110, 112, 114, 116, 118, 120, 122, 124, 126, 128, 130, 132, 134, 136, 138, 140, 142, 144, 146, 148, 150, 152, 154, 156, 158, 160, 162, 164, 166, 168, 170, 172, 174, 176, 178, 180, 182, 184, 186, 188, 190, 192, 194, 196, 198, 200, 202, 204, 206, 208, 210, 212, 214, 216, 218, 220, 222, 224, 226, 228, 230, 232, 234, 236, 238, 240, 242, 244, 246, 248, 250, 252, 254, 256, 258, 260, 262, 264, 266, 268, 270, 272, 274, 276, 278, 280, 282, 284, 286, 288, 290, 292, 294, 296, 298, 300, 302, 304, 306, 308, 310, 312, 314, 316, 318, 320, 322, 324, 326, 328, 330, 332, 334, 336, 338, 340, 342, 344, 346, 348, 350, 352, 354, 356, 358, 360, 362, 364, 366, 368, 370, 372, 374, 376, 378, 380, 382, 384, 386, 388, 390, 392 or 394 or its homologs;
[0075] g) increasing the copy number of a gene conferring the increased expression of a nucleic acid molecule encoding a protein encoded by the nucleic acid molecule of the invention or the protein of the invention the fine chemical increasing activity, e.g. of a protein having the biological activity represented by a protein as depicted in SEQ ID NO: 2, 4, 6, 8, 10, 12, 14, 16, 18, 20, 22, 24, 26, 28, 30, 32, 34, 36, 38, 40, 42, 44, 46, 56, 58, 60, 62, 64, 66, 68, 70, 72, 74, 76, 78, 80, 82, 84, 86, 88, 90, 92, 94, 96, 98, 100, 102, 104, 106, 108, 110, 112, 114, 116, 118, 120, 122, 124, 126, 128, 130, 132, 134, 136, 138, 140, 142, 144, 146, 148, 150, 152, 154, 156, 158, 160, 162, 164, 166, 168, 170, 172, 174, 176, 178, 180, 182, 184, 186, 188, 190, 192, 194, 196, 198, 200, 202, 204, 206, 208, 210, 212, 214, 216, 218, 220, 222, 224, 226, 228, 230, 232, 234, 236, 238, 240, 242, 244, 246, 248, 250, 252, 254, 256, 258, 260, 262, 264, 266, 268, 270, 272, 274, 276, 278, 280, 282, 284, 286, 288, 290, 292, 294, 296, 298, 300, 302, 304, 306, 308, 310, 312, 314, 316, 318, 320, 322, 324, 326, 328, 330, 332, 334, 336, 338, 340, 342, 344, 346, 348, 350, 352, 354, 356, 358, 360, 362, 364, 366, 368, 370, 372, 374, 376, 378, 380, 382, 384, 386, 388, 390, 392 or 394 or its homologs;
[0076] h) increasing the expression of the endogenous gene encoding the protein of the invention, e.g. a protein having the biological activity represented by a protein as depicted in SEQ ID NO: 2, 4, 6, 8, 10, 12, 14, 16, 18, 20, 22, 24, 26, 28, 30, 32, 34, 36, 38, 40, 42, 44, 46, 56, 58, 60, 62, 64, 66, 68, 70, 72, 74, 76, 78, 80, 82, 84, 86, 88, 90, 92, 94, 96, 98, 100, 102, 104, 106, 108, 110, 112, 114, 116, 118, 120, 122, 124, 126, 128, 130, 132, 134, 136, 138, 140, 142, 144, 146, 148, 150, 152, 154, 156, 158, 160, 162, 164, 166, 168, 170, 172, 174, 176, 178, 180, 182, 184, 186, 188, 190, 192, 194, 196, 198, 200, 202, 204, 206, 208, 210, 212, 214, 216, 218, 220, 222, 224, 226, 228, 230, 232, 234, 236, 238, 240, 242, 244, 246, 248, 250, 252, 254, 256, 258, 260, 262, 264, 266, 268, 270, 272, 274, 276, 278, 280, 282, 284, 286, 288, 290, 292, 294, 296, 298, 300, 302, 304, 306, 308, 310, 312, 314, 316, 318, 320, 322, 324, 326, 328, 330, 332, 334, 336, 338, 340, 342, 344, 346, 348, 350, 352, 354, 356, 358, 360, 362, 364, 366, 368, 370, 372, 374, 376, 378, 380, 382, 384, 386, 388, 390, 392 or 394 or its homologs, by adding positive expression or removing negative expression elements, e.g. homologous recombination can be used to either introduce positive regulatory elements like for plants the 35S enhancer into the promoter or to remove repressor elements form regulatory regions. Further gene conversion methods can be used to disrupt repressor elements or to enhance to acitivty of positive elements. Positive elements can be randomly introduced in plants by T-DNA or transposon mutagenesis and lines can be identified in which the positive elements have be integrated near to a gene of the invention, the expression of which is thereby enhanced;
[0077] i) modulating growth conditions of an organism in such a manner, that the expression or activity of the gene encoding the protein of the invention or the protein itself is enhanced for example microorganisms or plants can be grown under a higher temperature regime leading to an enhanced expression of heat shock proteins, e.g. the heat shock protein of the invention, which can lead an enhanced the fine chemical production; and/or
[0078] j) selecting of organisms with expecially high activity of the protein of the invention from natural or from mutagenized resources and breeding them into the target organisms, eg the elite crops.

[0079] Preferably, said mRNA is the nucleic acid molecule of the invention and/or the protein conferring the increased expression of a protein encoded by the nucleic acid molecule of the invention or the polypeptide having the herein mentioned activity, e.g. conferring the increase of the fine chemical after increasing the expression or activity of the encoded polypeptide or having the activity of a polypeptide having biological activity represented by a protein as depicted in SEQ ID NO: 2, 4, 6, 8, 10, 12, 14, 16, 18, 20, 22, 24, 26, 28, 30, 32, 34, 36, 38, 40, 42, 44, 46, 56, 58, 60, 62, 64, 66, 68, 70, 72, 74, 76, 78, 80, 82, 84, 86, 88, 90, 92, 94, 96, 98, 100, 102, 104, 106, 108, 110, 112, 114, 116, 118, 120, 122, 124, 126, 128, 130, 132, 134, 136, 138, 140, 142, 144, 146, 148, 150, 152, 154, 156, 158, 160, 162, 164, 166, 168, 170, 172, 174, 176, 178, 180, 182, 184, 186, 188, 190, 192, 194, 196, 198, 200, 202, 204, 206, 208, 210, 212, 214, 216, 218, 220, 222, 224, 226, 228, 230, 232, 234, 236, 238, 240, 242, 244, 246, 248, 250, 252, 254, 256, 258, 260, 262, 264, 266, 268, 270, 272, 274, 276, 278, 280, 282, 284, 286, 288, 290, 292, 294, 296, 298, 300, 302, 304, 306, 308, 310, 312, 314, 316, 318, 320, 322, 324, 326, 328, 330, 332, 334, 336, 338, 340, 342, 344, 346, 348, 350, 352, 354, 356, 358, 360, 362, 364, 366, 368, 370, 372, 374, 376, 378, 380, 382, 384, 386, 388, 390, 392 or 394 or its homologs.

[0080] In general, the amount of mRNA, polynucleotide or nucleic acid molecule in a cell or a compartment of an organism correlates with the amount of encoded protein and thus with the overall activity of the encoded protein in said volume. Said correlation is not always linear, the activity in the volume is dependent on the stability of the molecules, the degradation of the molecules or the presence of activating or inhibiting co-factors. Further, product and educt inhibitions of enzymes are well known and described in textbooks, e.g. Stryer, Biochemistry or Zinser et al. “Enzyminhibitoren”/Enzyme inhibitors”.

[0081] The activity of the abovementioned proteins and/or poylpeptide encoded by the nucleic acid molecule of the present invention can be increased in various ways. For example, the activity in an organism or in a part thereof, like a cell, is increased via increasing the gene product number, e.g. by increasing the expression rate, like introducing a stronger promoter, or by increasing the stability of the mRNA expressed, thus increasing the translation rate, and/or increasing the stability of the gene product, thus reducing the proteins decayed. Further, the activity or turnover of enzymes can be influenced in such a way that a reduction or increase of the reaction rate or a modification (reduction or increase) of the affinity to the substrate results, is reached. A mutation in the catalytic centre of a polypeptide of the invention, e.g. an enzyme, can modulate the turn over rate of the enzyme, e.g. a knock out of an essential amino acid can lead to a reduced or completely knock out activity of the enzyme, or the deletion or mutation of regulator binding sites can reduce a negative regulation like a feedback inhibition (or a substrate inhibition, if the substrate level is also increased). The specific activity of an enzyme of the present invention can be increased such that the turn over rate is increased or the binding of a co-factor is improved. Improving the stability of the encoding mRNA or the protein can also increase the activity of a gene product. The stimulation of the activity is also under the scope of the term “increased activity”.

[0082] Moreover, the regulation of the abovementioned nucleic acid sequences may be modified so that gene expression is increased. This can be achieved advantageously by means of heterologous regulatory sequences or by modifying, for example mutating, the natural regulatory sequences which are present. The advantageous methods may also be combined with each other.

[0083] In general, an activity of a gene product in an organism or part thereof, in particular in a plant cell, a plant, or a plant tissue or a part thereof or in a microorganism can be increased by increasing the amount of the specific encoding mRNA or the corresponding protein in said organism or part thereof. “Amount of protein or mRNA” is understood as meaning the molecule number of polypeptides or mRNA molecules in an organism, a tissue, a cell or a cell compartment. “Increase” in the amount of a protein means the quantitative increase of the molecule number of said protein in an organism, a tissue, a cell or a cell compartment or part thereof—for example by one of the methods described herein below—in comparison to a wild type, control or reference.

[0084] The increase in molecule number amounts preferably to at least1%, preferably to more than 10%, more preferably to 30% or more, especially preferably to 50%, 70% or more, very especially preferably to 100%, most preferably to 500% or more. However, a de novo expression is also regarded as subject of the present invention.

[0085] A modification, i.e. an increase or decrease, can be caused by endogenous or exogenous factors. For example, an increase in activity in an organism or a part thereof can be caused by adding a gene product or a precursor or an activator or an agonist to the media or nutrition or can be caused by introducing said subjects into a organism, transient or stable.

[0086] In one embodiment the increase in the amount of the fine chemical in the organism or a part thereof, e.g. in a cell, a tissue, an organ, an organelle etc., is achived by increasing the endogenous level of the polypeptide of the invention. Accordingly, in an embodiment of the present invention, the present invention relates to a process wherein the gene copy number of a gene encoding the polynucleotide or nucleic acid molecule of the invention is increased. Further, the endogenous level of the polypeptide of the invention can for example be increased by modifiying the transcriptional or translational regulation of the polypeptide.

[0087] In one embodiment the amount of the fine chemical in the organism or part thereof can be increase by targeted or random mutagenesis of the endogenous genes of the invention. For example homologous recombination can be used to either introduce positive regulatory elements like for plants the 35S enhancer into the promoter or to remove repressor elements form regulatory regions. In addition gene conversion like methods described by Kochevenko and Willmitzer (Plant Physiol. 2003 May; 132(1): 174-84) and citations therein can be used to disrupt repressor elements or to enhance to acitivty of positive regulatory elements. Furthermore positive elements can be randomly introduced in (plant) genomes by T-DNA or transposon mutagenesis and lines can be screened for, in which the positive elements has be integrated near to a gene of the invention, the expression of which is thereby enhanced. The activation of plant genes by random integrations of enhancer elements has been described by Hayashi et al., 1992 (Science 258:1350-1353) or Weigel et al., 2000 (Plant Physiol. 122, 1003-1013) and others citated therein. Reverse genetic strategies to identify insertions (which eventually carrying the activation elements) near in genes of interest have been described for various cases eg. Krysan et al., 1999 (Plant Cell 1999, 11, 2283-2290); Sessions et al., 2002 (Plant Cell 2002, 14, 2985-2994); Young et al., 2001, (Plant Physiol. 2001, 125, 513-518); Koprek et al., 2000 (Plant J. 2000, 24, 253-263); Jeon et al., 2000 (Plant J. 2000, 22, 561-570); Tissier et al., 1999 (Plant Cell 1999, 11, 1841-1852); Speulmann et al., 1999 (Plant Cell 1999, 11, 1853-1866). Briefly material from all plants of a large T-DNA or transposon mutagenized plant population is harvested and genomic DNA prepared. Then the genomic DNA is pooled following specific architectures as described for example in Krysan et al., 1999 (Plant Cell 1999, 11, 2283-2290). Pools of genomics DNAs are then screened by specific multiplex PCR reactions detecting the combination of the insertional mutagen (eg T-DNA or Transposon) and the gene of interest. Therefore PCR reactions are run on the DNA pools with specific combinations of T-DNA or transposon border primers and gene specific primers. General rules for primer design can again be taken from Krysan et al., 1999 (Plant Cell 1999, 11, 2283-2290) Rescreening of lower levels DNA pools lead to the identifcation of individual plants in which the gene of interest is disrupted by the insertional mutagen. The enhancement of positive regulatory elements or the disruption or weaking of negative regulatory elements can also be achieved through common mutagenesis techniques: The production of chemically or radiation mutated populations is a common technique and known to the skilled worker. Methods for plants are described by Koorneef et al. 1982 and the citations therein and by Lightner and Caspar in “Methods in Molecular Biology” Vol 82. These techniques usually induce pointmutations that can be identified in any known gene using methods such as TILLING (Colbert et al. 2001).

[0088] Accordingly, the expression level can be increased if the endogenous genes encoding a polypeptide conferring an increased expression of the polypeptide of the present invention, in particular genes comprising the nucleic acid molecule of the present invention, are modified via homologous recombination, Tilling approaches or gene conversion

[0089] Regulatory sequences can be operatively linked to the coding region of an endogenous protein and control its transcription and translation or the stability or decay of the encoding mRNA or the expressed protein. In order to modify and control the expression, promoter, UTRs, splicing sites, processing signals, polyadenylation sites, terminators, enhancers, repressors, post transcriptional or posttranslational modification sites can be changed, added or amended for example, the activation of plant genes by random integrations of enhancer elements has been described by Hayashi et al., 1992 (Science 258:1350-1353) or Weigel et al., 2000 (Plant Physiol. 122, 1003-1013) and others citated therein. For example, the expression level of the endogenous protein can be modulated by replacing the endogenous promoter with a stronger transgenic promoter or by replacing the endogenous 3′UTR with a 3′UTR, which provides more stablitiy without amending the coding region. Further, the transcriptional regulation can be modulated by introduction of an artifical transcription factor as described in the examples. Alternative promoters, terminators and UTR are described below.

[0090] The activation of an endogenous polypeptide having the fine chemical increasing activity, e.g. having the biological activity represented by a protein as depicted in SEQ ID NO: 2, 4, 6, 8, 10, 12, 14, 16, 18, 20, 22, 24, 26, 28, 30, 32, 34, 36, 38, 40, 42, 44, 46, 56, 58, 60, 62, 64, 66, 68, 70, 72, 74, 76, 78, 80, 82, 84, 86, 88, 90, 92, 94, 96, 98, 100, 102, 104, 106, 108, 110, 112, 114, 116, 118, 120, 122, 124, 126, 128, 130, 132, 134, 136, 138, 140, 142, 144, 146, 148, 150, 152, 154, 156, 158, 160, 162, 164, 166, 168, 170, 172, 174, 176, 178, 180, 182, 184, 186, 188, 190, 192, 194, 196, 198, 200, 202, 204, 206, 208, 210, 212, 214, 216, 218, 220, 222, 224, 226, 228, 230, 232, 234, 236, 238, 240, 242, 244, 246, 248, 250, 252, 254, 256, 258, 260, 262, 264, 266, 268, 270, 272, 274, 276, 278, 280, 282, 284, 286, 288, 290, 292, 294, 296, 298, 300, 302, 304, 306, 308, 310, 312, 314, 316, 318, 320, 322, 324, 326, 328, 330, 332, 334, 336, 338, 340, 342, 344, 346, 348, 350, 352, 354, 356, 358, 360, 362, 364, 366, 368, 370, 372, 374, 376, 378, 380, 382, 384, 386, 388, 390, 392 or 394, e.g. conferring the increase of the fine chemical after increase of expression or activity can also be increased by introducing a synthetic transcription factor, which binds close to the coding region of the protein of the invention encoding gene and activates its transcription. A chimeric zinc finger protein can be construed, which comprises a specific DNA-binding domain and an activation domain as e.g. the VP16 domain of Herpes Simplex virus. The specific binding domain can bind to the regulatory region of the nucleic acid sequence used in the inventive process. The expression of the chimeric transcription factor in an organism, in particular in a plant, leads to a specific expression of the protein of the invention, see e.g. in WO01/52620, Oriz, Proc. Natl. Acad. Sci. USA, 2002, Vol. 99, 13290 or Guan, Proc. Natl. Acad. Sci. USA, 2002, Vol. 99, 13296.

[0091] In one further embodiment of the process according to the invention, organisms are used in which one of the abovementioned genes, or one of the abovementioned nucleic acids, is mutated in a way that the activity of the encoded gene products is less influenced by cellular factors, or not at all, in comparison with the unmutated proteins. For example, well known regulation mechanism of enzymic activity are substrate inhibition or feed back regulation mechanisms. Ways and techniques for the introduction of substitutions, deletions and additions of one or more bases, nucleotides or amino acids of a corresponding sequence are described herein below in the corresponding paragraphs and the references listed there, e.g. in Sambrook et al., Molecular Cloning, Cold Spring Habour, N.Y., 1989. The person skilled in the art will be able to identify regulation domains and binding sites of regulators by comparing the sequence of the nucleic acid molecule of the present invention or the expression product thereof with the state of the art by computer software means which comprise algorithms for the identifying of binding sites and regulation domains or by introducing into a nucleic acid molecule or in a protein systematically mutations and assaying for those mutations which will lead to an increased specifiy activity or an increased activity per volume, in particular per cell.

[0092] It is therefore adavantageously to express in an organism a nucleic acid molecule of the invention or a polypeptide of the invention derived from a evolutionary distantly related organism, as e.g. using a prokaryotic gene in a eukaryotic host, as in these cases the regulation mechanism of the host cell may not weaken the activity (cellular or specific) of the gene or its expression product

[0093] The mutation is introduced in such a way that the production of the fine chemical is not adversely affected.

[0094] Less influence on the regulation of a gene or its gene product is understood as meaning a reduced regulation of the enzymatic activity leading to an increased specific or cellular activity of the gene or its product. An increase of the enzymatic activity is understood as meaning an enzymatic activity, which is increased by at least 10%, 20%, 30%, 40% or 50%, advantageously by at least 60%, 70%, 80%, 90% or 100%, especially advantageously by at least 150%, 200%, 300% or more in comparison with the starting organism. In the event the inventive nucleic acid sequences were introduced into an organism, which did not have the encoded protein activity, said new generated enzymatic activity shall also be embraced by the herein described invention. This leads to an increased productivity of the desired fine chemical.

[0095] Owing to the introduction of a gene or a plurality of genes conferring the expression of the nucleic acid molecule of the invention or the polypeptide of the invention as described below, for example the nucleic acid construct mentioned below, or e.g. encoding the protein as depicted in SEQ ID NO: 2, 4, 6, 8, 10, 12, 14, 16, 18, 20, 22, 24, 26, 28, 30, 32, 34, 36, 38, 40, 42, 44, 46, 56, 58, 60, 62, 64, 66, 68, 70, 72, 74, 76, 78, 80, 82, 84, 86, 88, 90, 92, 94, 96, 98, 100, 102, 104, 106, 108, 110, 112, 114, 116, 118, 120, 122, 124, 126, 128, 130, 132, 134, 136, 138, 140, 142, 144, 146, 148, 150, 152, 154, 156, 158, 160, 162, 164, 166, 168, 170, 172, 174, 176, 178, 180, 182, 184, 186, 188, 190, 192, 194, 196, 198, 200, 202, 204, 206, 208, 210, 212, 214, 216, 218, 220, 222, 224, 226, 228, 230, 232, 234, 236, 238, 240, 242, 244, 246, 248, 250, 252, 254, 256, 258, 260, 262, 264, 266, 268, 270, 272, 274, 276, 278, 280, 282, 284, 286, 288, 290, 292, 294, 296, 298, 300, 302, 304, 306, 308, 310, 312, 314, 316, 318, 320, 322, 324, 326, 328, 330, 332, 334, 336, 338, 340, 342, 344, 346, 348, 350, 352, 354, 356, 358, 360, 362, 364, 366, 368, 370, 372, 374, 376, 378, 380, 382, 384, 386, 388, 390, 392 or 394 into an organism alone or in combination with other genes, it is possible not only to increase the biosynthetic flux towards the end product, but also to increase, modify or create de novo an advantageous, preferably novel metabolites composition in the organism, e.g. an advantageous amino acid composition comprising a higher content of (from a viewpoint of nutrional physiology limited) amino acids, for example essential amino acids like tryptophane, threonine, methionine or lysine.

[0096] Preferably the composition comprises further higher amounts of metabolites positively affecting or lower amounts of metabolites negatively affecting the nutrition or health of animals or humans provided with said compositions or organisms of the invention or parts thereof. Likewise, the number or activity of further genes which are required for the import or export of nutrients or metabolites, including for example amino acids or its precursors, required for the cell's biosynthesis of the fine chemical may be increased so that the concentration of necessary or relevant precursors, cofactors or intermediates within the cell(s) or within the corresponding storage compartments is increased. Owing to the increased or novel generated activity of the polypeptide of the invention or owing to the increased number of nucleic acid sequences of the invention and/or to the modulation of further genes which are involved in the biosynthesis of the fine chemical, e.g. by increasing the acitivty of enzymes synthizing precursors or by destroying the activity of one or more genes which are involved in the breakdown of the fine chemical, it is thereby possible to increase the yield, production and/or production efficiency of the fine chemical in the host organism, such as plants or microorganims.

[0097] Accordingly, in one embodiment, the process according to the invention relates to a process, which comprises:
[0098] a) providing a non-human organism, preferably a microorganism, non-human animal, plant or part, cell or tissue thereof;
[0099] b) increasing the biological activity represented by a protein as depicted in SEQ ID NO: 2, 4, 6, 8, 10, 12, 14, 16, 18, 20, 22, 24, 26, 28, 30, 32, 34, 36, 38, 40, 42, 44, 46, 56, 58, 60, 62, 64, 66, 68, 70, 72, 74, 76, 78, 80, 82, 84, 86, 88, 90, 92, 94, 96, 98, 100, 102, 104, 106, 108, 110, 112, 114, 116, 118, 120, 122, 124, 126, 128, 130, 132, 134, 136, 138, 140, 142, 144, 146, 148, 150, 152, 154, 156, 158, 160, 162, 164, 166, 168, 170, 172, 174, 176, 178, 180, 182, 184, 186, 188, 190, 192, 194, 196, 198, 200, 202, 204, 206, 208, 210, 212, 214, 216, 218, 220, 222, 224, 226, 228, 230, 232, 234, 236, 238, 240, 242, 244, 246, 248, 250, 252, 254, 256, 258, 260, 262, 264, 266, 268, 270, 272, 274, 276, 278, 280, 282, 284, 286, 288, 290, 292, 294, 296, 298, 300, 302, 304, 306, 308, 310, 312, 314, 316, 318, 320, 322, 324, 326, 328, 330, 332, 334, 336, 338, 340, 342, 344, 346, 348, 350, 352, 354, 356, 358, 360, 362, 364, 366, 368, 370, 372, 374, 376, 378, 380, 382, 384, 386, 388, 390, 392 or 394 or of a polypeptide being encoded by the nucleic acid molecule of the invention and described below, i.e. conferring an increase of the fine chemical in the organism, preferably in the microorganism, the non-human animal, the plant or part, cell or tissue thereof,
[0100] c) growing the organism, preferably the microorganism, the non-human animal, the plant or part, cell or tissue thereof under conditions which permit the production of the fine chemical; and
[0101] d) if desired, revovering, optionally isolating, the free and/or bound fine chemical.

[0102] The organism, in particular the microorganism, non-human animal, the plant or animal parts, the plant or animal cell, the plant or animal tissue or the plant is advantageously grown in such a way that it is not only possible to recover, if desired isolate the free or bound fine chemical (Galili et al., Transgenic Res., 2000, 9, 2, 137-144).

[0103] After the above-described increasing (which as defined above also encompasses the generating of an activity in an organism, i.e. a de novo activity), for example after the introduction and the expression of the nucleic acid molecules of the invention or described in the methods or processes according to the invention, the organism according to the invention, advantageously, a microorganism, a non-human animal, a plant, plant or animal tissue or plant or animal cell, is grown and subsequently harvested.

[0104] Suitable organisms or host organisms (transgenic organism) for the nucleic acid molecule used according to the invention and for the inventive process, the nucleic acid construct or the vector (both as described below) are, in principle, all organisms which are capable of synthesizing the fine chemical, and which are suitable for the activation, introduction or stimulation genes. Examples which may be mentioned are plants, microorganisms such as fungi, bacteria, yeasts, alga or diatom, transgenic or obtained by site directed mutagenesis or random mutagenesis combined with specific selection procedures. Preferred organisms are those which are naturally capable of synthesizing the fine chemical in substantial amounts, like fungi, yeasts, bactria or plants. In principle, transgenic animals, for example Caenorhabditis elegans, are also suitable as host organisms.

[0105] In the event that the transgenic organism is a microorganism, such as a eukaryotic organism, for example a fungus, an alga, diatom or a yeast in particular a fungus, alga, diatom or yeast selected from the families Chaetomiaceae, Choanephoraceae, Cryptococcaceae, Cunninghamellaceae, Demetiaceae, Dipodascaceae, Moniliaceae, Mortierellaceae, Mucoraceae, Pythiaceae, Saccharomycetaceae, Saprolegniaceae, Schizosaccharomycetaceae, Sodariaceae, Sporobolomycetaceae Tuberculariaceae, Adelotheciaceae, Dinophyceae, Ditrichaceae or Prasinophyceae, or a fungus selected from the families Tremellaceae, Filobasidiaceae, Christianseniaceae, Cystofilobasidiaceae, Sordariaceae, Annulatascaceae, Cephalothecaceae, Chaetomiaceae, Coniochaetaceae, Lasiosphaeriaceae, Pleurotremataceae, Elaphomycetaceae, Trichocomaceae, Mucoraceae, Schizophyllaceae, Onygenaceae, Suillaceae, Hypocreaceae, Ustilaginaceae, Trichocomaceae, Phyllachoraceae, Erysiphaceae or a prokaryotic organism, for example a bacterium or blue alga, in particular a bacterium from the families Actinomycetaceae, Bacillaceae, Brevibacteriaceae, Corynebacteriaceae, Cyanophyceae, Enterobacteriacae, Gordoniaceae, Nocardiaceae, Micrococcaceae, Mycobacteriaceae, Pseudomonaceae, Rhizobiaceae or Streptomycetaceae, this microorganism is grown on a solid or in a liquid medium which is known to the skilled worker and suits the organism. After the growing phase, the organisms can be harvested.

[0106] The microorganisms or the recovered, and if desired isolated, fine chemical can then be processed further directly into foodstuffs or animal feeds or for other applications, for example according to the disclosures made in EP-B-0 533 039 or EP-A-0 615 693, which are expressly incorporated herein by reference. The fermentation broth or fermentation products can be purified in the customary manner by extraction and precipitation or via ion exchangers and other methods known to the person skilled in the art and described herein below. Products of these different work-up procedures are fine chemical e.g. amino acids or amino acid compositions which still comprise fermentation broth and cell components in different amounts, advantageously in the range of from 0 to 99% by weight, preferably below 80% by weight, especially preferably between below 50%, 40%, 30%, 20%, 10% or 5% by weight.

[0107] Preferred microorganisms are selected from the group consisting of Chaetomiaceae such as the genera Chaetomium e.g. the species Chaetomidium fimeti; Choanephoraceae such as the genera Blakeslea, Choanephora e.g. the species Blakeslea trispora, Choanephora cucurbitarum or Choanephora infundibulifera var. cucurbitarum; Cryptococcaceae such as the genera Candida, Crytococcus, Rhodotorula, Torulopsis e.g. the species Candida albicans, Candida albomarginata, Candida antarctica, Candida bacarum, Candida bogoriensis, Candida boidinii, Candida bovina, Candida brumptii, Candida cacaoi, Candida cariosilignicola, Candida catenulata, Candida chalmersii, Candida ciferrii, Candida cylindracea, Candida edax, Candida ernobii, Candida famata, Candida freyschussii, Candida friedrichii, Candida glabrata, Candida guilliermondii, Candida haemulonii, Candida humicola, Candida inconspicua, Candida ingens, Candida intermedia, Candida kefyr, Candida krusei, Candida lactiscondensi, Candida lambica, Candida lipolytica, Candida lusitaniae, Candida macedoniensis, Candida magnoliae, Candida membranaefaciens, Candida mesenterica, Candida multigemmis, Candida mycoderma, Candida nemodendra, Candida nitratophila, Candida norvegensis, Candida norvegica, Candida parapsilosis, Candida pelliculosa, Candida peltata, Candida pini, Candida pseudotropicalis, Candida pulcherrima, Candida punicea, Candida pustula, Candida ravautii, Candida reukaufii, Candida rugosa, Candida sake, Candida silvicola, Candida solani, Candida sp., Candida spandovensis, Candida succiphila, Candida tropicalis, Candida utilis, Candida valida, Candida versatilis, Candida vini, Candida zeylanoides, Cryptococcus albidus, Cryptococcus curvatus, Cryptococcus flavus, Cryptococcus humicola, Cryptococcus hungaricus, Cryptococcus kuetzingii, Cryptococcus laurentii, Cryptococcus macerans, Cryptococcus neoformans, Cryptococcus terreus, Cryptococcus uniguttulatus, Rhodotorula acheniorum, Rhodotorula bacarum, Rhodotorula bogoriensis, Rhodotorula flava, Rhodotorula glutinis, Rhodotorula macerans, Rhodotorula minuta, Rhodotorula mucilaginosa, Rhodotorula pilimanae, Rhodotorula pustula, Rhodotorula rubra, Rhodotorula tokyoensis, Torulopsis colliculosa, Torulopsis dattila or Torulopsis neoformans; such as the genera Cunninghamella e.g. the species Cunninghamella blakesleeana, Cunninghamella echinulata, Cunninghamella echinulata var. elegans, Cunninghamella elegans or Cunninghamella homothallica; Demetiaceae such as the genera Alternaria, Bipolaris, Cercospora, Chalara, Cladosporium, Curvularia, Exophilia, Helicosporium, Helminthosporium, Orbimyces, Philalophora, Pithomyces, Spilocaea, Thielaviopsis, Wangiella e.g. the species Curvularia affinis, Curvularia clavata, Curvularia fallax, Curvularia inaequalis, Curvularia indica, Curvularia lunata, Curvularia pallescens, Curvularia verruculosa or Helminothosporium sp.; Moniliaceae such as the genera Arthrobotrys, Aspergillus, Epidermophyton, Geotrichum, Gliocladium, Histoplasma, Microsporum, Monilia, Oedocephalum, Oidium, Penicillium, Trichoderma, Trichophyton, Thrichoteclum, Verticillium e.g. the species Aspergillus aculeatus, Aspergillus albus, Aspergillus alliaceus, Aspergillus asperescens, Aspergillus awamori, Aspergillus candidus, Aspergillus carbonarius, Aspergillus carneus, Aspergillus chevalieri, Aspergillus chevalieri var. intermedius, Aspergillus clavatus, Aspergillus ficuum, Aspergillus flavipes, Aspergillus flavus, Aspergillus foetidus, Aspergillus fumigatus, Aspergillus giganteus, Aspergillus humicola, Aspergillus intermedius, Aspergillus japonicus, Aspergillus nidulans, Aspergillus niger, Aspergillus niveus, Aspergillus ochraceus, Aspergillus oryzae, Aspergillus ostianus, Aspergillus parasiticus, Aspergillus parasiticus var. globosus, Aspergillus penicillioides, Aspergillus phoenicis, Aspergillus rugulosus, Aspergillus sclerotiorum, Aspergillus sojae var. gymnosardae, Aspergillus sydowi, Aspergillus tamarai, Aspergillus terreus, Aspergillus terricola, Aspergillus toxicarius, Aspergillus unguis, Aspergillus ustus, Aspergillus versicolor, Aspergillus vitricolae, Aspergillus wentii, •Penicillium adametzi, •Penicillium albicans, Penicillium arabicum, Penicillium arenicola, Penicillium argillaceum, Penicillium arvense, Penicillium asperosporum, •Penicillium aurantiogriseum, •Penicillium avellaneum, •Penicillium baarnense, •Penicillium bacillisporum, •Penicillium brasilianum, •Penicillium brevicompactum, •Penicillium camemberti, •Penicillium canadense, •Penicillium canescens, •Penicillium caperatum, •Penicillium capsulatum, •Penicillium caseicolum, •Penicillium chrysogenum, •Penicillium citreonigrum, •Penicillium citrinum, •Penicillium claviforme, •Penicillium commune, •Penicillium corylophilum, •Penicillium corymbiferum, •Penicillium crustosum, •Penicillium cyclopium, •Penicillium daleae, •Penicillium decumbens, •Penicillium dierckxii, •Penicillium digitatum, •Penicillium digitatum var. latum, •Penicillium divaricatum, •Penicillium diversum, •Penicillium duclauxii, •Penicillium echinosporum, •Penicillium expansum, •Penicillium fellutanum, •Penicillium frequentans, •Penicillium funiculosum, •Penicillium glabrum, •Penicillium gladioli, •Penicillium griseofulvum, •Penicillium hirsutum, •Penicillium hispanicum, •Penicillium islandicum, •Penicillium italicum, •Penicillium italicum var. avellaneum, •Penicillium janczewskii, •Penicillium janthinellum, •Penicillium japonicum, •Penicillium lavendulum, •Penicillium lilacinum, •Penicillium lividum, •Penicillium martensii, Penicillium megasporum, •Penicillium miczynskii, •Penicillium nalgiovense, •Penicillium nigricans, Penicillium notatum, •Penicillium ochrochloron, •Penicillium odoratum, •Penicillium oxalicum, •Penicillium paraherquei, •Penicillium patulum, •Penicillium pinophilum, •Penicillium piscarium, •Penicillium pseudostromaticum, •Penicillium puberulum, •Penicillium purpurogenum, •Penicillium raciborskii, •Penicillium roqueforti, •Penicillium rotundum, •Penicillium rubrum, •Penicillium sacculum, •Penicillium simplicissimum, Penicillium sp., Penicillium spinulosum, Penicillium steckii, Penicillium stoloniferum, Penicillium striatisporum, Penicillium striatum, Penicillium tardum, Penicillium thomii, Penicillium turbatum, Penicillium variabile, Penicillium vermiculatum, Penicillium vermoesenii, Penicillium verrucosum, Penicillium verrucosum var. corymbiferum, Penicillium verrucosum var. cyclopium, Penicillium verruculosum, Penicillium vinaceum, Penicillium violaceum, Penicillium viridicatum, Penicillium vulpinum, Trichoderma hamatum, Trichoderma harzianum, Trichoderma koningii, Trichoderma longibrachiatum, Trichoderma polysporum, Trichoderma reesei, Trichoderma virens or Trichoderma viride; Mortierellaceae such as the genera Mortierella e.g. the species Mortierella isabellina, Mortierella polycephala, Mortierella ramanniana, Mortierella vinacea or Mortierella zonata; Mucoraceae such as the genera Actinomucor, Mucor, Phycomyces, Rhizopus, Zygorhynchus e.g. the species Mucor amphibiorum, Mucor circinelloides f. circinelloides, Mucor circinelloides var. griseocyanus, Mucor flavus, Mucor fuscus, Mucor griseocyanus, Mucor heterosporus, Mucor hiemalis, Mucor hiemalis f. hiemalis, Mucor inaequisporus, Mucor indicus, Mucor javanicus, Mucor mucedo, Mucor mucilagineus, Mucor piriformis, Mucor plasmaticus, Mucor plumbeus, Mucor racemosus, Mucor racemosus f. racemosus, Mucor racemosus f. sphaerosporus, Mucor rouxianus, Mucor rouxii, Mucor sinensis, Mucor sp., Mucor spinosus, Mucor tuberculisporus, Mucor varlisporus, Mucor variosporus, Mucor wosnessenskii, Phycomyces blakesleeanus, Rhizopus achlamydosporus, Rhizopus arrhizus, Rhizopus chinensis, Rhizopus delemar, Rhizopus formosaensis, Rhizopus japonicus, Rhizopus javanicus, Rhizopus microsporus, Rhizopus microsporus var. chinensis, Rhizopus microsporus var. oligosporus, Rhizopus microsporus var. rhizopodiformis, Rhizopus nigricans, Rhizopus niveus, Rhizopus oligosporus, Rhizopus oryzae, Rhizopus pygmaeus, Rhizopus rhizopodiformis, Rhizopus semarangensis, Rhizopus sontii, Rhizopus stolonifer, Rhizopus thermosus, Rhizopus tonkinensis, Rhizopus tritici or Rhizopus usamii; Pythiaceae such as the genera Phytium, Phytophthora e.g. the species Pythium debaryanum, Pythium intermedium, Pythium irregulare, Pythium megalacanthum, Pythium paroecandrum, Pythium sylvaticum, Pythium ultimum, Phytophthora cactorum, Phytophthora cinnamomi, Phytophthora citricola, Phytophthora citrophthora, Phytophthora cryptogea, Phytophthora drechsleri, Phytophthora erythroseptica, Phytophthora lateralis, Phytophthora megasperma, Phytophthora nicotianae, Phytophthora nicotianae var. parasitica, Phytophthora palmivora, Phytophthora parasitica or Phytophthora syringae; Saccharomycetaceae such as the genera Hansenula, Pichia, Saccharomyces, Saccharomycodes, Yarrowia e.g. the species Hansenula anomala, Hansenula californica, Hansenula canadensis, Hansenula capsulata, Hansenula ciferrii, Hansenula glucozyma, Hansenula henricii, Hansenula holstii, Hansenula minuta, Hansenula nonfermentans, Hansenula philodendri, Hansenula polymorpha, Hansenula saturnus, Hansenula subpelliculosa, Hansenula wickerhamii, Hansenula wingei, Pichia alcoholophila, Pichia angusta, Pichia anomala, Pichia bispora, Pichia burtonii, Pichia canadensis, Pichia capsulata, Pichia carsonii, Pichia cellobiosa, Pichia ciferrii, Pichia farinosa, Pichia fermentans, Pichia finlandica, Pichia glucozyma, Pichia guilliermondii, Pichia haplophila, Pichia henricii, Pichia holstii, Pichia jadinii, Pichia lindnerii, Pichia membranaefaciens, Pichia methanolica, Pichia minuta var. minuta, Pichia minuta var. nonfermentans, Pichia norvegensis, Pichia ohmeri, Pichia pastoris, Pichia philodendri, Pichia pini, Pichia polymorpha, Pichia quercuum, Pichia rhodanensis, Pichia sargentensis, Pichia stipitis, Pichia strasburgensis, Pichia subpelliculosa, Pichia toletana, Pichia trehalophila, Pichia vini, Pichia xylosa, Saccharomyces aceti, Saccharomyces bailii, Saccharomyces bayanus, Saccharomyces bisporus, Saccharomyces capensis, Saccharomyces carisbergensis, Saccharomyces cerevisiae, Saccharomyces cerevisiae var. ellipsoideus, Saccharomyces chevalieri, Saccharomyces delbrueckii, Saccharomyces diastaticus, Saccharomyces drosophilarum, Saccharomyces elegans, Saccharomyces ellipsoideus, Saccharomyces fermentati, Saccharomyces florentinus, Saccharomyces fragilis, Saccharomyces heterogenicus, Saccharomyces hienipiensis, Saccharomyces inusitatus, Saccharomyces italicus, Saccharomyces kluyveri, Saccharomyces krusei, Saccharomyces lactis, Saccharomyces marxianus, Saccharomyces microellipsoides, Saccharomyces montanus, Saccharomyces norbensis, Saccharomyces oleaceus, Saccharomyces paradoxus, Saccharomyces pastorianus, Saccharomyces pretoriensis, Saccharomyces rosei, Saccharomyces rouxii, Saccharomyces uvarum, Saccharomycodes ludwigii or Yarrowia lipolytica; Saprolegniaceae such as the genera Saprolegnia e.g. the species Saprolegnia ferax; Schizosaccharomycetaceae such as the genera Schizosaccharomyces e.g. the species Schizosaccharomyces japonicus var. japonicus, Schizosaccharomyces japonicus var. versatilis, Schizosaccharomyces malidevorans, Schizosaccharomyces octosporus, Schizosaccharomyces pombe var. malidevorans or Schizosaccharomyces pombe var. pombe; Sodariaceae such as the genera Neurospora, Sordaria e.g. the species Neurospora africana, Neurospora crassa, Neurospora intermedia, Neurospora sitophila, Neurospora tetrasperma, Sordaria fimicola or Sordaria macrospora; Tuberculariaceae such as the genera Epicoccum, Fusarium, Myrothecium, Sphacelia, Starkeyomyces, Tubercularia e.g. the species Fusarium acuminatum, Fusarium anthophilum, Fusarium aquaeductuum, Fusarium aquaeductuum var. medium, Fusarium avenaceum, Fusarium buharicum, Fusarium camptoceras, Fusarium cerealis, Fusanum chlamydosporum, Fusarium ciliatum, Fusarium coccophilum, Fusarium coeruleum, Fusarium concolor, Fusarium crookwellense, Fusarium culmorum, Fusarium dimerum, Fusarium diversisporum, Fusarium equiseti, Fusanum equiseti var. bullatum, Fusarium eumartii, Fusarium flocciferum, Fusarium fujikuroi, Fusarium graminearum, Fusarium graminum, Fusarium heterosporum, Fusarium incarnatum, Fusarium inflexum, Fusarium javanicum, Fusarium lateritium, Fusarium lateritium var. majus, Fusarium longipes, Fusarium melanochlorum, Fusarium merismoides, Fusarium merismoides var. chlamydosporale, Fusarium moniliforme, Fusarium moniliforme var. anthophilum, Fusarium moniliforme var. subglutinans, Fusarium nivale, Fusarium nivale var. majus, Fusarium oxysporum, Fusarium oxysporumf. sp. aechmeae, Fusarium oxysporumf. sp. cepae, Fusarium oxysporumf. sp. conglutinans, Fusarium oxysporumf. sp. cucumerinum, Fusarium oxysporumf. sp. cyclaminis, Fusarium oxysporumf. sp. dianthi, Fusarium oxysporum f. sp. lycopersici, Fusarium oxysporumf. sp. melonis, Fusarium oxysporumf. sp. passiflorae, Fusarium oxysporumf. sp. pisi, Fusarium oxysporumf. sp. tracheiphilum, Fusarium oxysporumf. sp. tuberosi, Fusarium oxysporumf. sp. tulipae, Fusarium oxysporumf. sp. vasinfectum, Fusarium pallidoroseum, Fusarium poae, Fusarium proliferatum, Fusarium proliferatum var. minus, Fusarium redolens, Fusarium redolens f. sp. dianthi, Fusarium reticulatum, Fusarium roseum, Fusarium sacchari var. elongatum, Fusarium sambucinum, Fusarium sambucinum var. coeruleum, Fusarium semitectum, Fusarium semitectum var. majus, Fusarium solani, Fusarium solanif. sp. pisi, Fusarium sporotrichioides, Fusarium sporotrichioides var. minus, Fusarium sublunatum, Fusarium succisae, Fusarium sulphureum, Fusarium tabacinum, Fusarium tricinctum, Fusarium udum, Fusarium ventricosum, Fusarium verticillioides, Fusarium xylarioides or Fusarium zonatum; Sporobolomycetaceae such as the genera Bullera, Sporobolomyces, Itersonilia e.g. the species Sporobolomyces holsaticus, Sporobolomyces odorus, Sporobolomyces puniceus, Sporobolomyces salmonicolor, Sporobolomyces singularis or Sporobolomyces tsugae; Adelotheciaceae such as the genera e.g. the species Physcomitrella patens; Dinophyceae such as the genera Crypthecodinium, Phaeodactylum e.g. the species Crypthecodinium cohnii or Phaeodactylum tricornutum; Ditrichaceae such as the genera Ceratodon, Pleuridium, Astomiopsis, Ditrichum, Philibertiella, Ceratodon, Distichium, Skottsbergia e.g. the species Ceratodon antarcticus, Ceratodon purpureus, Ceratodon purpureus ssp. convolutes or Ceratodon purpureus ssp. stenocarpus; Prasinophyceae such as the genera Nephroselmis, Prasinococcus, Scherffelia, Tetraselmis, Mantoniella, Ostreococcus e.g. the species Nephroselmis olivacea, Prasinococcus capsulatus, Scherffelia dubia, Tetraselmis chui, Tetraselmis suecica, Mantoniella squamata or Ostreococcus tauri; Actinomycetaceae such as the genera Actinomyces, Actinobaculum, Arcanobacterium, Mobiluncus e.g. the species Actinomyces bernardiae, Actinomyces bovis, Actinomyces bowdenii, Actinomyces canis, Actinomyces cardiffensis, Actinomyces catuli, Actinomyces coleocanis, Actinomyces denticolens, Actinomyces europaeus, Actinomyces funkei, Actinomyces georgiae, Actinomyces gerencseriae, Actinomyces hordeovulneris, Actinomyces howellii, Actinomyces humiferus, Actinomyces hyovaginalis, Actinomyces israelii Actinomyces marimammalium, Actinomyces meyeri, Actinomyces naeslundii, Actinomyces nasicola, Actinomyces neuii subsp. anitratus, Actinomyces neuii subsp. neuii, Actinomyces odontolyticus, Actinomyces oricola, Actinomyces pyogenes, Actinomyces radicidentis, Actinomyces radingae, Actinomyces slackii, Actinomyces suimastitidis, Actinomyces suis, Actinomyces turicensis, Actinomyces urogenitalis, Actinomyces vaccimaxillae, Actinomyces viscosus, Actinobaculum schaalii, Actinobaculum suis, Actinobaculum urinale, Arcanobacterium bernardiae, Arcanobacterium haemolyticum, Arcanobacterium hippocoleae, Arcanobacterium phocae, Arcanobacterium pluranimalium, Arcanobacterium pyogenes, Mobiluncus curtisii subsp. curtisii, Mobiluncus curtisii subsp. holmesii or Mobiluncus mulieris; Bacillaceae such as the genera Amphibacillus, Anoxybacillus, Bacillus, Exiguobacterium, Gracilibacillus, Holobacillus, Saccharococcus, Salibacillus, Virgibacillus e.g. the species Amphibacillus fermentum, Amphibacillus tropicus, Amphibacillus xylanus, Anoxybacillus flavithermus, Anoxybacillus gonensis, Anoxybacillus pushchinoensis, Bacillus acidocaldarius, Bacillus acidoterrestris, Bacillus aeolius, Bacillus agaradhaerens, Bacillus agri, Bacillus alcalophilus, Bacillus alginolyticus, Bacillus alvei, Bacillus amyloliquefaciens, Bacillus amylolyticus, Bacillus aneurinilyticus, Bacillus aquimaris, Bacillus arseniciselenatis, Bacillus atrophaeus, Bacillus azotofixans, Bacillus azotoformans, Bacillus badius, Bacillus barbaricus, Bacillus benzoevorans, Bacillus borstelensis, Bacillus brevis, Bacillus carboniphilus, Bacillus centrosporus, Bacillus cereus, Bacillus chitinolyticus, Bacillus chondroitinus, Bacillus choshinensis, Bacillus circulans, Bacillus clarkii, Bacillus clausii, Bacillus coagulans, Bacillus cohnii, Bacillus curdlanolyticus, Bacillus cycloheptanicus, Bacillus decolorationis, Bacillus dipsosauri, Bacillus edaphicus, Bacillus ehimensis, Bacillus endophyticus, Bacillus fastidiosus, Bacillus firmus, Bacillus flexus, Bacillus formosus, Bacillus fumarioli, Bacillus funiculus, Bacillus fusiformis, Bacillus sphaericus subsp. fusiformis, Bacillus galactophilus, Bacillus globisporus, Bacillus globisporus subsp. marinus, Bacillus glucanolyticus, Bacillus gordonae, Bacillus halmapalus, Bacillus haloalkaliphilus, Bacillus halodenitrificans, Bacillus halodurans, Bacillus halophilus, Bacillus horikoshii, Bacillus horti, Bacillus infernos, Bacillus insolitus, Bacillus jeotgali, Bacillus kaustophilus, Bacillus kobensis, Bacillus krulwichiae, Bacillus laevolacticus, Bacillus larvae, Bacillus laterosporus, Bacillus lautus, Bacillus lentimorbus, Bacillus lentus, Bacillus licheniformis, Bacillus luciferensis, Bacillus macerans, Bacillus macquarensis, Bacillus marinus, Bacillus marisflavi, Bacillus marismortui, Bacillus megaterium, Bacillus methanolicus, Bacillus migulanus, Bacillus mojavensis, Bacillus mucilaginosus, Bacillus mycoides, Bacillus naganoensis, Bacillus nealsonii, Bacillus neidei, Bacillus niacini, Bacillus okuhidensis, Bacillus oleronius, Bacillus pabuli, Bacillus pallidus, Bacillus pantothenticus, Bacillus parabrevis, Bacillus pasteurii, Bacillus peoriae, Bacillus polymyxa, Bacillus popilliae, Bacillus pseudalcaliphilus, Bacillus pseudofirmus, Bacillus pseudomycoides, Bacillus psychrodurans, Bacillus psychrophilus, Bacillus psychrosaccharolyticus, Bacillus psychrotolerans, Bacillus pulvifaciens, Bacillus pumilus, Bacillus pycnus, Bacillus reuszeri, Bacillus salexigens, Bacillus schlegelii, Bacillus selenitireducens, Bacillus silvestris, Bacillus simplex, Bacillus siralis, Bacillus smithii, Bacillus sonorensis, Bacillus sphaericus, Bacillus sporothermodurans, Bacillus stearothermophilus, Bacillus subterraneus, Bacillus subtilis subsp. spizizenii, Bacillus subtilis subsp. subtilis, Bacillus thermantarcticus, Bacillus thermoaerophilus, Bacillus thermoamylovorans, Bacillus thermoantarcticus, Bacillus thermocatenulatus, Bacillus thermocloacae, Bacillus thermodenitrificans, Bacillus thermoglucosidasius, Bacillus thermoleovorans, Bacillus thermoruber, Bacillus thermosphaericus, Bacillus thiaminolyticus, Bacillus thuringiensis, Bacillus tusciae, Bacillus validus, Bacillus vallismortis, Bacillus vedderi, Bacillus vulcani, Bacillus weihenstephanensis, Exiguobacterium acetylicum, Exiguobacterium antarcticum, Exiguobacterium aurantiacum, Exiguobacterium undae, Gracilibacillus dipsosauri, Gracilibacillus halotolerans, Halobacillus halophilus, Halobacillus karajensis, Halobacillus litoralis, Halobacillus salinus, Halobacillus trueperi, Saccharococcus caldoxylosilyticus, Saccharococcus thermophilus, Salibacillus marismortui, Salibacillus salexigens, Virgibacillus carmonensis, Virgibacillus marismortui, Virgibacillus necropolis, Virgibacillus pantothenticus, Virgibacillus picturae, Virgibacillus proomii or Virgibacillus salexigens, Brevibacteriaceae such as the genera Brevibacterium e.g. the species Brevibacterium acetylicum, Brevibacterium albidum, Brevibacterium ammoniagenes, Brevibacterium avium, Brevibacterium casei, Brevibacterium citreum, Brevibacterium divaricatum, Brevibacterium epidermidis, Brevibacterium fermentans, Brevibacterium frigoritolerans, Brevibacterium halotolerans, Brevibacterium imperiale, Brevibacterium incertum, Brevibacterium iodinum, Brevibacterium linens, Brevibacterium liquefaciens, Brevibacterium lutescens, Brevibacterium luteum, Brevibacterium lyticum, Brevibacterium mcbrellneri, Brevibacterium otitidis, Brevibacterium oxydans, Brevibacterium paucivorans, Brevibacterium protophormiae, Brevibacterium pusillum, Brevibacterium saperdae, Brevibacterium stationis, Brevibacterium testaceum or Brevibacterium vitaeruminis; Corynebacteriaceae such as the genera Corynebacterium e.g. the species Corynebacterium accolens, Corynebacterium afermentans subsp. afermentans, Corynebacterium afermentans subsp. lipophilum, Corynebacterium ammoniagenes, Corynebacterium amycolatum, Corynebacterium appendicis, Corynebacterium aquilae, Corynebacterium argentoratense, Corynebacterium atypicum, Corynebacterium aurimucosum, Corynebacterium auris, Corynebacterium auriscanis, Corynebacterium betae, Corynebacterium beticola, Corynebacterium bovis, Corynebacterium callunae, Corynebacterium camporealensis, Corynebacterium capitovis, Corynebacterium casei, Corynebacterium confusum, Corynebacterium coyleae, Corynebacterium cystitidis, Corynebacterium durum, Corynebacterium efficiens, Corynebacterium equi, Corynebacterium falsenii, Corynebacterium fascians, Corynebacterium felinum, Corynebacterium flaccumfaciens, Corynebacterium flavescens, Corynebacterium freneyi, Corynebacterium glaucum, Corynebacterium glucuronolyticum, Corynebacterium glutamicum, Corynebacterium hoagii, Corynebacterium ilicis, Corynebacterium imitans, Corynebacterium insidiosum, Corynebacterium iranicum, Corynebacterium jeikeium, Corynebacterium kroppenstedtii, Corynebacterium kutscheri, Corynebacterium lilium, Corynebacterium lipophiloflavum, Corynebacterium macginleyi, Corynebacterium mastitidis, Corynebacterium matruchotii, Corynebacterium michiganense, Corynebacterium michiganense subsp. tessellarius, Corynebacterium minutissimum, Corynebacterium mooreparkense, Corynebacterium mucifaciens, Corynebacterium mycetoides, Corynebacterium nebraskense, Corynebacterium oortii, Corynebacterium paurometabolum, Corynebacterium phocae, Corynebacterium pilosum, Corynebacterium poinsettiae, Corynebacterium propinquum, Corynebacterium pseudodiphtheriticum, Corynebacterium pseudotuberculosis, Corynebacterium pyogenes, Corynebacterium rathayi, Corynebacterium renale, Corynebacterium riegelii, Corynebacterium seminale, Corynebacterium sepedonicum, Corynebacterium simulans, Corynebacterium singulare, Corynebacterium sphenisci, Corynebacterium spheniscorum, Corynebacterium striatum, Corynebacterium suicordis, Corynebacterium sundsvallense, Corynebacterium terpenotabidum, Corynebacterium testudinoris, Corynebacterium thomssenii, Corynebacterium tritici, Corynebacterium ulcerans, Corynebacterium urealyticum, Corynebacterium variabile, Corynebacterium vitaeruminis or Corynebacterium xerosis; Enterobacteriacae such as the genera Alterococcus, Arsenophonus, Brenneria, Buchnera, Budvicia, Buttiauxella, Calymmatobacterium, Cedecea, Citrobacter, Edwardsiella, Enterobacter, Erwinia, Escherichia, Ewingelia, Hafnia, Klebsiella, Kluyvera, Leclercia, Leminorella, Moellerella, Morganella, Obesumbacterium, Pantoea, Pectobacterium, Photorhabdus, Plesiomonas, Pragia, Proteus, Providencia, Rahnella, Saccharobacter, Salmonella, Shigella, Serratia, Sodalis, Tatumella, Trabulsiella, Wigglesworthia, Xenorhabdus,Yersinia and Yokenella e.g. the species Arsenophonus nasoniae, Brenneria alni, Brenneria nigrifluens, Brenneria quercina, Brenneria rubrifaciens, Brenneria salicis, Budvicia aquatica, Buttiauxella agrestis, Buttiauxella brennerae, Buttiauxella ferragutiae, Buttiauxella gaviniae, Buttiauxella izardii, Buttiauxella noackiae, Buttiauxella warmboldiae, Cedecea davisae, Cedecea lapagei, Cedecea neteri, Citrobacter amalonaticus, Citrobacter diversus, Citrobacter freundii, Citrobacter genomospecies, Citrobacter gilleni, Citrobacter intermedium, Citrobacter koseri, Citrobacter murliniae, Citrobacter sp., Edwardsiella hoshinae, Edwardsiella ictaluri, Edwardsiella tarda, Erwinia alni, Erwinia amylovora, Erwinia ananatis, Erwinia aphidicola, Erwinia billingiae, Erwinia cacticida, Erwinia cancerogena, Erwinia carnegieana, Erwinia carotovora subsp. atroseptica, Erwinia carotovora subsp. betavasculorum, Erwinia carotovora subsp. odorifera, Erwinia carotovora subsp. wasabiae, Erwinia chrysanthemi, Erwinia cypripedii, Erwinia dissolvens, Erwinia herbicola, Erwinia mallotivora, Erwinia milletiae, Erwinia nigrifluens, Erwinia nimipressuralis, Erwinia persicina, Erwinia psidii, Erwinia pyrifoliae, Erwinia quercina, Erwinia rhapontici, Erwinia rubrifaciens, Erwinia salicis, Erwinia stewartii, Erwinia tracheiphila, Erwinia uredovora, Escherichia adecarboxylata, Escherichia anindolica, Escherichia aurescens, Escherichia blattae, Escherichia coli, Escherichia coli var. communior, Escherichia coli-mutabile, Escherichia fergusonii, Escherichia hermannii, Escherichia sp., Escherichia vulneris, Ewingella americana, Hafnia alvei, Klebsiella aerogenes, Klebsiella edwardsii subsp. atlantae, Klebsiella ornithinolytica, Klebsiella oxytoca, Klebsiella planticola, Klebsiella pneumoniae, Klebsiella pneumoniae subsp. pneumoniae, Klebsiella sp., Klebsiella terrigena, Klebsiella trevisanii, Kluyvera ascorbata, Kluyvera citrophila, Kluyvera cochleae, Kluyvera cryocrescens, Kluyvera georgiana, Kluyvera noncitrophila, Kluyvera sp., Leclercia adecarboxylata, Leminorella grimontii, Leminorella richardii, Moellerella wisconsensis, Morganella morganii, Morganella morganii subsp. morganii, Morganella morganii subsp. sibonli, Obesumbaterium proteus, Pantoea agglomerans, Pantoea ananatis, Pantoea citrea, Pantoea dispersa, Pantoea punctata, Pantoea stewartii subsp. stewartii, Pantoea terrea, Pectobacterium atrosepticum, Pectobacterium carotovorum subsp. atrosepticum, Pectobacterium carotovorum subsp. carotovorum, Pectobacterium chrysanthemi, Pectobacterium cypripedii, Photorhabdus asymbiotica, Photorhabdus luminescens, Photorhabdus luminescens subsp. akhurstii, Photorhabdus luminescens subsp. laumondii, Photorhabdus luminescens subsp. luminescens, Photorhabdus sp., Photorhabdus temperata, Plesiomonas shigelloides, Pragia fontium, Proteus hauseri, Proteus ichthyosmius, Proteus inconstans, Proteus mirabilis, Proteus morganii, Proteus myxofaciens, Proteus penneri, Proteus rettgeri, Proteus shigelloides, Proteus vulgaris, Providencia alcalifaciens, Providencia friedericiana, Providencia heimbachae, Providencia rettgeri, Providencia rustigianii, Providencia stuartii, Rahnella aquatilis, Salmonella abony, Salmonella arizonae, Salmonella bongori, Salmonella choleraesuis subsp. arizonae, Salmonella choleraesuis subsp. bongori, Salmonella choleraesuis subsp. cholereasuis, Salmonella choleraesuis subsp. diarizonae, Salmonella choleraesuis subsp. houtenae, Salmonella choleraesuis subsp. indica, Salmonella choleraesuis subsp. salamae, Salmonella daressalaam, Salmonella enterica subsp. houtenae, Salmonella enterica subsp. salamae, Salmonella enteritidis, Salmonella gallinarum, Salmonella heidelberg, Salmonella panama, Salmonella senftenberg, Salmonella typhimurium, Serratia entomophila, Serratia ficaria, Serratia fonticola, Serratia grimesii, Serratia liquefaciens, Serratia marcescens, Serratia marcescens subsp. marcescens, Serratia madinorubra, Serratia odorifera, Serratia plymouthensis, Serratia plymuthica, Serratia proteamaculans, Serratia proteamaculans subsp. quinovora, Serratia quinivorans, Serratia rubidaea, Shigella boydii, Shigella flexneri, Shigella paradysenteriae, Shigella sonnei, Tatumella ptyseos, Xenorhabdus beddingli, Xenorhabdus bovienii, Xenorhabdus luminescens, Xenorhabdus nematophila, Xenorhabdus nematophila subsp. beddingii, Xenorhabdus nematophila subsp. bovienii, Xenorhabdus nematophila subsp. poinardi or Xenorhabdus poinarii; Gordoniaceae such as the genera Gordonia, Skermania e.g. the species Gordonia aichiensis, Gordonia alkanivorans, Gordonia amarae, Gordonia amicalis, Gordonia bronchialis, Gordonia desulfuricans, Gordonia hirsuta, Gordonia hydrophobica, Gordonia namibiensis, Gordonia nitida, Gordonia paraffinivorans, Gordonia polyisoprenivorans, Gordonia rhizosphera, Gordonia rubripertincta, Gordonia sihwensis, Gordonia sinesedis, Gordonia sputi, Gordonia terrae or Gordonia westfalica; Micrococcaceae such as the genera Micrococcus, Arthrobacter, Kocuria, Nesterenkonia, Renibacterium, Rothia, Stomatococcus e.g. the species Micrococcus agilis, Micrococcus antarcticus, Micrococcus halobius, Micrococcus kristinae, Micrococcus luteus, Micrococcus lylae, Micrococcus nishinomiyaensis, Micrococcus roseus, Micrococcus sedentarius, Micrococcus varians, Arthrobacter agilis, Arthrobacter albus, Arthrobacter atrocyaneus, Arthrobacter aurescens, Arthrobacter chlorophenolicus, Arthrobacter citreus, Arthrobacter creatinolyticus, Arthrobacter crystallopoietes, Arthrobacter cumminsii, Arthrobacter duodecadis, Arthrobacter flavescens, Arthrobacter flavus, Arthrobacter gandavensis, Arthrobacter globiformis, Arthrobacter histidinolovorans, Arthrobacter ilicis, Arthrobacter koreensis, Arthrobacter luteolus, Arthrobacter methylotrophus, Arthrobacter mysorens, Arthrobacter nasiphocae, Arthrobacter nicotianae, Arthrobacter nicotinovorans, Arthrobacter oxydans, Arthrobacter pascens, Arthrobacter picolinophilus, Arthrobacter polychromogenes, Arthrobacter protophormiae, Arthrobacter psychrolactophilus, Arthrobacter radiotolerans, Arthrobacter ramosus, Arthrobacter rhombi, Arthrobacter roseus, Arthrobacter siderocapsulatus, Arthrobacter simplex, Arthrobacter sulfonivorans, Arthrobacter sulfureus, Arthrobacter terregens, Arthrobacter tumescens, Arthrobacter uratoxydans, Arthrobacter ureafaciens, Arthrobacter variabilis, Arthrobacter viscosus, Arthrobacter woluwensis, Kocuria erythromyxa, Kocuria kristinae, Kocuria palustris, Kocuria polaris, Kocuria rhizophila, Kocuria rosea, Kocuria varians, Nesterenkonia halobia, Nesterenkonia lacusekhoensis, Renibacterium salmoninarum, Rothia amarae, Rothia dentocariosa, Rothia mucilaginosa, Rothia nasimurium or Stomatococcus mucilaginosus; Mycobacteriaceae such as the genera Mycobacterium e.g. the species Mycobacterium afficanum, Mycobactenum agri, Mycobacterium aichiense, Mycobacterium alvei, Mycobacterium asiaticum, Mycobacterium aurum, Mycobacterium austroafricanum, Mycobacterium bohemicum, Mycobacterium botniense, Mycobacterium brumae, Mycobacterium chelonae subsp. abscessus, Mycobacterium chitae, Mycobacterium chlorophenolicum, Mycobacterium chubuense, Mycobacterium confluentis, Mycobacterium cookii, Mycobacterium diernhoferi, Mycobacterium doricum, Mycobacterium duvalii, Mycobacterium fallax, Mycobacterium farcinogenes, Mycobacterium flavescens, Mycobacterium frederiksbergense, Mycobacterium gadium, Mycobacterium gilvum, Mycobacterium gordonae, Mycobacterium hassiacum, Mycobacterium hiberniae, Mycobacterium hodleri, Mycobacterium holsaticum, Mycobacterium komossense, Mycobacterium lacus, Mycobacterium madagascariense, Mycobacterium mageritense, Mycobacterium montefiorense, Mycobacterium moriokaense, Mycobacterium murale, Mycobacterium neoaurum, Mycobacterium nonchromogenicum, Mycobacterium obuense, Mycobacterium palustre, Mycobacterium parafortuitum, Mycobacterium peregrinum, Mycobacterium phlei, Mycobacterium pinnipedii, Mycobacterium poriferae, Mycobacterium pulveris, Mycobacterium rhodesiae, Mycobacterium shottsii, Mycobacterium sphagni, Mycobacterium terrae, Mycobacterium thermoresistibile, Mycobacterium tokaiense, Mycobacterium triviale, Mycobactenium tusciae or Mycobacterium vanbaalenii; Nocardiaceae such as the genera Nocardia, Rhodococcus e.g. the species Nocardia abscessus, Nocardia africana, Nocardia amarae, Nocardia asteroides, Nocardia autotrophica, Nocardia beijingensis, Nocardia brasiliensis, Nocardia brevicatena, Nocardia caishijiensis, Nocardia calcarea, Nocardia carnea, Nocardia cellulans, Nocardia cerradoensis, Nocardia coeliaca, Nocardia corynebacterioides, Nocardia crassostreae, Nocardia cummidelens, Nocardia cyriacigeorgica, Nocardia farcinica, Nocardia flavorosea, Nocardia fluminea, Nocardia globerula, Nocardia hydrocarbonoxydans, Nocardia ignorata, Nocardia mediterranei, Nocardia nova, Nocardia orientalis, Nocardia otitidiscaviarum, Nocardia otitidiscaviarum, Nocardia paucivorans, Nocardia petroleophila, Nocardia pinensis, Nocardia pseudobrasiliensis, Nocardia pseudovaccinii, Nocardia puris, Nocardia restricta, Nocardia rugosa, Nocardia salmonicida, Nocardia saturnea, Nocardia seriolae, Nocardia soli, Nocardia sulphurea, Nocardia transvalensis, Nocardia uniformis, Nocardia vaccinii, Nocardia veterana or Nocardia vinacea; Pseudomonaceae such as the genera Azomonas, Azotobacter, Cellvibrio, Chryseomonas, Flaviomonas, Lampropedia, Mesophilobacter, Morococcus, Oligella, Pseudomonas, Rhizobacter, Rugamonas, Serpens, Thermoleophilum, Xylophilus e.g. the species Azomonas agilis, Azomonas insignis, Azomonas macrocytogenes, Azotobacter agilis, Azotobacter agilis subsp. armeniae, Azotobacter armeniacus, Azotobacter beijerinckii, Azotobacter chroococcum, Azotobacter indicum, Azotobacter macrocytogenes, Azotobacter miscellum, Azotobacter nigricans subsp. nigricans, Azotobacter paspali, Azotobacter salinestris, Azotobacter sp., Azotobacter vinelandii, Flavimonas oryzihabitans, Mesophilobacter marinus, Oligella urethralis, Pseudomonas acidovorans, Pseudomonas aeruginosa, Pseudomonas agarici, Pseudomonas alcaligenes, Pseudomonas aminovorans, Pseudomonas amygdali, Pseudomonas andropogonis, Pseudomonas anguilliseptica, Pseudomonas antarctica, Pseudomonas antimicrobica, Pseudomonas antimycetica, Pseudomonas aptata, Pseudomonas arvilla, Pseudomonas asplenii, Pseudomonas atlantica, Pseudomonas atrofaciens, Pseudomonas aureofaciens, Pseudomonas avellanae, Pseudomonas azelaica, Pseudomonas azotocolligans, Pseudomonas balearica, Pseudomonas barkeri, Pseudomonas bathycetes, Pseudomonas beijeinckii, Pseudomonas brassicacearum, Pseudomonas brenneri, Pseudomonas butanovora, Pseudomonas carboxydoflava, Pseudomonas carboxydohydrogena, Pseudomonas carboxydovorans, Pseudomonas carrageenovora, Pseudomonas caryophylli, Pseudomonas cepacia, Pseudomonas chloritidismutans, Pseudomonas chlororaphis, Pseudomonas cichorii, Pseudomonas citronellolis, Pseudomonas cocovenenans, Pseudomonas compransoris, Pseudomonas congelans, Pseudomonas coronafaciens, Pseudomonas corrugata, Pseudomonas dacunhae, Pseudomonas delafieldii, Pseudomonas delphinii, Pseudomonas denitrificans, Pseudomonas desmolytica, Pseudomonas diminuta, Pseudomonas doudoroffii, Pseudomonas echinoides, Pseudomonas elongata, Pseudomonas extorquens, Pseudomonas extremorientalis, Pseudomonas facilis, Pseudomonas ficuserectae, Pseudomonas flava, Pseudomonas flavescens, Pseudomonas fluorescens, Pseudomonas fragi, Pseudomonas frederiksbergensis, Pseudomonas fulgida, Pseudomonas fuscovaginae, Pseudomonas gazotropha, Pseudomonas gladioli, Pseudomonas glathei, Pseudomonas glumae, Pseudomonas graminis, Pseudomonas halophila, Pseudomonas helianthi, Pseudomonas huttiensis, Pseudomonas hydrogenothermophila, Pseudomonas hydrogenovora, Pseudomonas indica, Pseudomonas indigofera, Pseudomonas iodinum, Pseudomonas kilonensis, Pseudomonas lachrymans, Pseudomonas lapsa, Pseudomonas lemoignei, Pseudomonas lemonnieri, Pseudomonas lundensis, Pseudomonas luteola, Pseudomonas maltophilia, Pseudomonas marginalis, Pseudomonas marginata, Pseudomonas marina, Pseudomonas meliae, Pseudomonas mendocina, Pseudomonas mesophilica, Pseudomonas mixta, Pseudomonas monteilii, Pseudomonas morsprunorum, Pseudomonas multivorans, Pseudomonas natriegens, Pseudomonas nautica, Pseudomonas nitroreducens, Pseudomonas oleovorans, Pseudomonas oryzihabitans, Pseudomonas ovalis, Pseudomonas oxalaticus, Pseudomonas palleronii, Pseudomonas paucimobilis, Pseudomonas phaseolicola, Pseudomonas phenazinium, Pseudomonas pickettii, Pseudomonas pisi, Pseudomonas plantarii, Pseudomonas plecoglossicida, Pseudomonas poae, Pseudomonas primulae, Pseudomonas proteolytica, Pseudomonas pseudoalcaligenes, Pseudomonas pseudoalcaligenes subsp. konjaci, Pseudomonas pseudoalcaligenes subsp. pseudoalcaligenes, Pseudomonas pseudoflava, Pseudomonas putida, Pseudomonas putida var. naraensis, Pseudomonas putrefaciens, Pseudomonas pyrrocinia, Pseudomonas radiora, Pseudomonas reptilivora, Pseudomonas rhodesiae, Pseudomonas rhodos, Pseudomonas riboflavina, Pseudomonas rubescens, Pseudomonas rubrisubalbicans, Pseudomonas ruhlandii, Pseudomonas saccharophila, Pseudomonas savastanoi, Pseudomonas savastanoi pvar. glycinea, Pseudomonas savastanoi pvar. phaseolicola, Pseudomonas solanacearum, Pseudomonas sp., Pseudomonas spinosa, Pseudomonas stanieri, Pseudomonas stutzeri, Pseudomonas syringae, Pseudomonas syringae pvar. aptata, Pseudomonas syringae pvar. atrofaciens, Pseudomonas syringae pvar. coronafaciens, Pseudomonas syringae pvar. delphinii, Pseudomonas syringae pvar. glycinea, Pseudomonas syringae pvar. helianthi, Pseudomonas syringae pvar. lachrymans, Pseudomonas syringae pvar. lapsa, Pseudomonas syringae pvar. morsprunorum, Pseudomonas syringae pvar. phaseolicola, Pseudomonas syringae pvar. primulae, Pseudomonas syringae pvar. syringae, Pseudomonas syringae pvar. tabaci, Pseudomonas syringae pvar. tomato, Pseudomonas syringae subsp. glycinea, Pseudomonas syringae subsp. savastanoi, Pseudomonas syringae subsp. syringae, Pseudomonas syzygii, Pseudomonas tabaci, Pseudomonas taeniospiralis, Pseudomonas testosteroni, Pseudomonas thermocarboxydovorans, Pseudomonas thermotolerans, Pseudomonas thivervalensis, Pseudomonas tomato, Pseudomonas trivialis, Pseudomonas veronii, Pseudomonas vesicularis, Pseudomonas viridiflava, Pseudomonas viscogena, Pseudomonas woodsii, Rhizobacter dauci, Rhizobacter daucus or Xylophilus ampelinus; Rhizobiaceae such as the genera Agrobacterium, Carbophilus, Chelatobacter, Ensifer, Rhizobium, Sinorhizobium e.g. the species Agrobacterium atlanticum, Agrobacterium ferrugineum, Agrobacterium gelatinovorum, Agrobacterium lanymoorei, Agrobacterium meteori, Agrobacterium radiobacter, Agrobacterium rhizogenes, Agrobacterium rubi, Agrobacterium stellulatum, Agrobacterium tumefaciens, Agrobacterium vitis, Carbophilus carboxidus, Chelatobacter heintzii, Ensifer adhaerens, Ensifer arboris, Ensifer fredii, Ensifer kostiensis, Ensifer kummerowiae, Ensifer medicae, Ensifer meliloti, Ensifer saheli, Ensifer terangae, Ensifer xinjiangensis, Rhizobium ciceri Rhizobium etli, Rhizobium fredii, Rhizobium galegae, Rhizobium gallicum, Rhizobium giardinii, Rhizobium hainanense, Rhizobium huakuii, Rhizobium huautlense, Rhizobium indigoferae, Rhizobium japonicum, Rhizobium leguminosarum, Rhizobium loessense, Rhizobium loti, Rhizobium lupini, Rhizobium mediterraneum, Rhizobium meliloti, Rhizobium mongolense, Rhizobium phaseoli, Rhizobium radiobacter, Rhizobium rhizogenes, Rhizobium rubi, Rhizobium sullae, Rhizobium tianshanense, Rhizobium trifolii, Rhizobium tropici, Rhizobium undicola, Rhizobium vitis, Sinorhizobium adhaerens, Sinorhizobium arboris, Sinorhizobium fredii, Sinorhizobium kostiense, Sinorhizobium kummerowiae, Sinorhizobium medicae, Sinorhizobium meliloti, Sinorhizobium morelense, Sinorhizobium saheli or Sinorhizobium xinjiangense; Streptomycetaceae such as the genera Kitasatosprora, Streptomyces, Streptoverticillium e.g. the species Streptomyces abikoensis, Streptomyces aburaviensis, Streptomyces achromogenes subsp. achromogenes, Streptomyces achromogenes subsp. rubradiris, Streptomyces acidiscabies, Streptomyces acrimycini, Streptomyces aculeolatus, Streptomyces afghaniensis, Streptomyces alanosinicus, Streptomyces albaduncus, Streptomyces albiaxialis, Streptomyces albidochromogenes, Streptomyces albidoflavus, Streptomyces albireticuli, Streptomyces albofaciens, Streptomyces alboflavus, Streptomyces albogriseolus, Streptomyces albolongus, Streptomyces alboniger, Streptomyces albospinus, Streptomyces albosporeus subsp. albosporeus, Streptomyces albosporeus subsp. labilomyceticus, Streptomyces alboverticillatus, Streptomyces albovinaceus, Streptomyces alboviridis, Streptomyces albulus, Streptomyces albus subsp. albus, Streptomyces albus subsp. pathocidicus, Streptomyces almquistii, Streptomyces althioticus, Streptomyces amakusaensis, Streptomyces ambofaciens, Streptomyces aminophilus, Streptomyces anandii, Streptomyces anthocyanicus, Streptomyces antibioticus, Streptomyces antimycoticus, Streptomyces anulatus, Streptomyces arabicus, Streptomyces ardus, Streptomyces arenae, Streptomyces argenteolus, Streptomyces armeniacus, Streptomyces asiaticus, Streptomyces asterosporus, Streptomyces atratus, Streptomyces atroaurantiacus, Streptomyces atroolivaceus, Streptomyces atrovirens, Streptomyces aurantiacus, Streptomyces aurantiogriseus, Streptomyces aureocirculatus, Streptomyces aureofaciens, Streptomyces aureorectus, Streptomyces aureoversilis, Streptomyces aureoverticillatus, Streptomyces aureus, Streptomyces avellaneus, Streptomyces avermectinius, Streptomyces avermitilis, Streptomyces avidinii, Streptomyces azaticus, Streptomyces azureus, Streptomyces baarnensis, Streptomyces bacillaris, Streptomyces badius, Streptomyces baldaccii, Streptomyces bambergiensis, Streptomyces bejiangensis, Streptomyces bellus, Streptomyces bikiniensis, Streptomyces biverticillatus, Streptomyces blastmyceticus, Streptomyces bluensis, Streptomyces bobili, Streptomyces bottropensis, Streptomyces brasiliensis, Streptomyces bungoensis, Streptomyces cacaoi subsp. asoensis, Streptomyces cacaoi subsp. cacaoi, Streptomyces caelestis, Streptomyces caeruleus, Streptomyces californicus, Streptomyces calvus, Streptomyces canaries, Streptomyces candidus, Streptomyces canescens, Streptomyces cangkringensis, Streptomyces caniferus, Streptomyces canus, Streptomyces capillispiralis, Streptomyces capoamus, Streptomyces carpaticus, Streptomyces carpinensis, Streptomyces catenulae, Streptomyces caviscabies, Streptomyces cavourensis subsp. cavourensis, Streptomyces cavourensis subsp. washingtonensis, Streptomyces cellostaticus, Streptomyces celluloflavus, Streptomyces cellulolyticus, Streptomyces cellulosae, Streptomyces champavatii, Streptomyces chartreuses, Streptomyces chattanoogensis, Streptomyces chibaensis, Streptomyces chrestomyceticus, Streptomyces chromofuscus, Streptomyces chryseus, Streptomyces chrysomallus subsp. chrysomallus, Streptomyces chrysomallus subsp. fumigatus, Streptomyces cinereorectus, Streptomyces cinereoruber subsp. cinereoruber, Streptomyces cinereoruber subsp. fructofermentans, Streptomyces cinereospinus, Streptomyces cinereus, Streptomyces cinerochromogenes, Streptomyces cinnabarinus, Streptomyces cinnamonensis, Streptomyces cinnamoneus, Streptomyces cinnamoneus subsp. albosporus, Streptomyces cinnamoneus subsp. cinnamoneus, Streptomyces cinnamoneus subsp. lanosus, Streptomyces cinnamoneus subsp. sparsus, Streptomyces cirratus, Streptomyces ciscaucasicus, Streptomyces citreofluorescens, Streptomyces clavifer, Streptomyces clavuligerus, Streptomyces cochleatus, Streptomyces coelescens, Streptomyces coelicoflavus, Streptomyces coelicolor, Streptomyces coeruleoflavus, Streptomyces coeruleofuscus, Streptomyces coeruleoprunus, Streptomyces coeruleorubidus, Streptomyces coerulescens, Streptomyces collinus, Streptomyces colombiensis, Streptomyces corchorusii, Streptomyces costaricanus, Streptomyces cremeus, Streptomyces crystallinus, Streptomyces curacoi, Streptomyces cuspidosporus, Streptomyces cyaneofuscatus, Streptomyces cyaneus, Streptomyces cyanoalbus, Streptomyces cystargineus, Streptomyces daghestanicus, Streptomyces diastaticus subsp. ardesiacus, Streptomyces diastaticus subsp. diastaticus, Streptomyces diastatochromogenes, Streptomyces distallicus, Streptomyces djakartensis, Streptomyces durhamensis, Streptomyces echinatus, Streptomyces echinoruber, Streptomyces ederensis, Streptomyces ehimensis, Streptomyces endus, Streptomyces enissocaesilis, Streptomyces erumpens, Streptomyces erythraeus, Streptomyces erythrogriseus, Streptomyces eurocidicus, Streptomyces europaeiscabiei, Streptomyces eurythermus, Streptomyces exfoliates, Streptomyces felleus, Streptomyces fervens, Streptomyces fervens subsp. fervens, Streptomyces fervens subsp. melrosporus, Streptomyces flamentosus, Streptomyces filipinensis, Streptomyces fimbriatus, Streptomyces fimicarius, Streptomyces finlayi, Streptomyces flaveolus, Streptomyces flaveus, Streptomyces flavidofuscus, Streptomyces flavidovirens, Streptomyces flaviscleroticus, Streptomyces flavofungini, Streptomyces flavofuscus, Streptomyces flavogriseus, Streptomyces flavopersicus, Streptomyces flavotricini, Streptomyces flavovariabilis, Streptomyces flavovirens, Streptomyces flavoviridis, Streptomyces flocculus, Streptomyces floridae, Streptomyces fluorescens, Streptomyces fradiae, Streptomyces fragilis, Streptomyces fulvissimus, Streptomyces fulvorobeus, Streptomyces fumanus, Streptomyces fumigatiscleroticus, Streptomyces galbus, Streptomyces galilaeus, Streptomyces gancidicus, Streptomyces gardneri, Streptomyces gelaticus, Streptomyces geysiriensis, Streptomyces ghanaensis, Streptomyces gibsonii, Streptomyces glaucescens, Streptomyces glaucosporus, Streptomyces glaucus, Streptomyces globisporus subsp. caucasicus, Streptomyces globisporus subsp. flavofuscus, Streptomyces globisporus subsp. globisporus, Streptomyces globosus, Streptomyces glomeratus, Streptomyces glomeroaurantiacus, Streptomyces gobitricini, Streptomyces goshikiensis, Streptomyces gougerotii, Streptomyces graminearus, Streptomyces graminofaciens, Streptomyces griseinus, Streptomyces griseoaurantiacus, Streptomyces griseobrunneus, Streptomyces griseocameus, Streptomyces griseochromogenes, Streptomyces griseoflavus, Streptomyces griseofuscus, Streptomyces griseoincamratus, Streptomyces griseoloalbus, Streptomyces griseolosporeus, Streptomyces griseolus, Streptomyces griseoluteus, Streptomyces griseomycini, Streptomyces griseoplanus, Streptomyces griseorubens, Streptomyces griseoruber, Streptomyces griseorubiginosus, Streptomyces griseosporeus, Streptomyces griseostramineus, Streptomyces griseoverticillatus, Streptomyces griseoviridis, Streptomyces griseus subsp. alpha, Streptomyces griseus subsp. cretosus, Streptomyces griseus subsp. griseus, Streptomyces griseus subsp. solvifaciens, Streptomyces hachijoensis, Streptomyces halstedii, Streptomyces hawaiiensis, Streptomyces heliomycini, Streptomyces helvaticus, Streptomyces herbaricolor, Streptomyces hiroshimensis, Streptomyces hirsutus, Streptomyces humidus, Streptomyces humiferus, Streptomyces hydrogenans, Streptomyces hygroscopicus subsp. angustmyceticus, Streptomyces hygroscopicus subsp. decoyicus, Streptomyces hygroscopicus subsp. glebosus, Streptomyces hygroscopicus subsp. hygroscopicus, Streptomyces hygroscopicus subsp. ossamyceticus, Streptomyces iakyrus, Streptomyces indiaensis, Streptomyces indigoferus, Streptomyces indonesiensis, Streptomyces intermedius, Streptomyces inusitatus, Streptomyces ipomoeae, Streptomyces janthinus, Streptomyces javensis, Streptomyces kanamyceticus, Streptomyces kashmirensis, Streptomyces kasugaensis, Streptomyces katrae, Streptomyces kentuckensis, Streptomyces kifunensis, Streptomyces kishiwadensis, Streptomyces kunmingensis, Streptomyces kurssanovii, Streptomyces labedae, Streptomyces laceyi, Streptomyces ladakanum, Streptomyces lanatus, Streptomyces lateritius, Streptomyces laurentii, Streptomyces lavendofoliae, Streptomyces lavendulae subsp. grasserius, Streptomyces lavendulae subsp. lavendulae, Streptomyces lavenduligriseus, Streptomyces lavendulocolor, Streptomyces levis, Streptomyces libani subsp. libani, Streptomyces libani subsp. rufus, Streptomyces lienomycini, Streptomyces lilacinus, Streptomyces limosus, Streptomyces lincolnensis, Streptomyces lipmanii, Streptomyces litmocidini, Streptomyces lomondensis, Streptomyces longisporoflavus, Streptomyces longispororuber, Streptomyces longisporus, Streptomyces longwoodensis, Streptomyces lucensis, Streptomyces luridiscabiei, Streptomyces luridus, Streptomyces lusitanus, Streptomyces luteireticuli, Streptomyces luteogriseus, Streptomyces luteosporeus, Streptomyces luteoverticillatus, Streptomyces lydicus, Streptomyces macrosporus, Streptomyces malachitofuscus, Streptomyces malachitospinus, Streptomyces malaysiensis, Streptomyces mashuensis, Streptomyces massasporeus, Streptomyces matensis, Streptomyces mauvecolor, Streptomyces mediocidicus, Streptomyces mediolani, Streptomyces megasporus, Streptomyces melanogenes, Streptomyces melanosporofaciens, Streptomyces mexicanus, Streptomyces michiganensis, Streptomyces microflavus, Streptomyces minutiscleroticus, Streptomyces mirabilis, Streptomyces misakiensis, Streptomyces misionensis, Streptomyces mobaraensis, Streptomyces monomycini, Streptomyces morookaensis, Streptomyces murinus, Streptomyces mutabilis, Streptomyces mutomycini, Streptomyces naganishii, Streptomyces narbonensis, Streptomyces nashvillensis, Streptomyces netropsis, Streptomyces neyagawaensis, Streptomyces niger, Streptomyces nigrescens, Streptomyces nigrifaciens, Streptomyces nitrosporeus, Streptomyces niveiciscabiei, Streptomyces niveoruber, Streptomyces niveus, Streptomyces noboritoensis, Streptomyces nodosus, Streptomyces nogalater, Streptomyces nojiriensis, Streptomyces noursei, Streptomyces novaecaesareae, Streptomyces ochraceiscleroticus, Streptomyces odorifer, Streptomyces olivaceiscleroticus, Streptomyces olivaceoviridis, Streptomyces olivaceus, Streptomyces olivochromogenes, Streptomyces olivomycini, Streptomyces olivoreticuli, Streptomyces olivoreticuli subsp. cellulophilus, Streptomyces olivoreticuli subsp. olivoreticuli, Streptomyces olivoverticillatus, Streptomyces olivoviridis, Streptomyces omiyaensis, Streptomyces orinoci, Streptomyces pactum, Streptomyces paracochleatus, Streptomyces paradoxus, Streptomyces parvisporogenes, Streptomyces parvulus, Streptomyces parvus, Streptomyces peucetius, Streptomyces phaeochromogenes, Streptomyces phaeofaciens, Streptomyces phaeopurpureus, Streptomyces phaeoviridis, Streptomyces phosalacineus, Streptomyces pilosus, Streptomyces platensis, Streptomyces plicatus, Streptomyces pluricolorescens, Streptomyces polychromogenes, Streptomyces poonensis, Streptomyces praecox, Streptomyces prasinopilosus, Streptomyces prasinosporus, Streptomyces prasinus, Streptomyces prunicolor, Streptomyces psammoticus, Streptomyces pseudoechinosporeus, Streptomyces pseudogriseolus, Streptomyces pseudovenezuelae, Streptomyces pulveraceus, Streptomyces puniceus, Streptomyces puniciscabiei, Streptomyces purpeofuscus, Streptomyces purpurascens, Streptomyces purpureus, Streptomyces purpurogeneiscleroticus, Streptomyces racemochromogenes, Streptomyces rameus, Streptomyces ramuilosus, Streptomyces rangoonensis, Streptomyces recifensis, Streptomyces rectiverticillatus, Streptomyces rectiviolaceus, Streptomyces regensis, Streptomyces resistomycificus, Streptomyces reticuliscabiei, Streptomyces rhizosphaericus, Streptomyces rimosus subsp. paromomycinus, Streptomyces rimosus subsp. rimosus, Streptomyces rishiriensis, Streptomyces rochei, Streptomyces roseiscleroticus, Streptomyces roseodiastaticus, Streptomyces roseoflavus, Streptomyces roseofulvus, Streptomyces roseolilacinus, Streptomyces roseolus, Streptomyces roseosporus, Streptomyces roseoverticillatus, Streptomyces roseoviolaceus, Streptomyces roseoviridis, Streptomyces rubber, Streptomyces rubiginosohelvolus, Streptomyces rubiginosus, Streptomyces rubrogriseus, Streptomyces rutgersensis subsp. castelarensis, Streptomyces rutgersensis subsp. rutgersensis, Streptomyces salmonis, Streptomyces sampsonii, Streptomyces sanglieri, Streptomyces sannanensis, Streptomyces sapporonensis, Streptomyces scabiei, Streptomyces sclerotialus, Streptomyces scopiformis, Streptomyces seoulensis, Streptomyces septatus, Streptomyces setae, Streptomyces setonii, Streptomyces showdoensis, Streptomyces sindenensis, Streptomyces sioyaensis, Streptomyces somaliensis, Streptomyces sparsogenes, Streptomyces spectabilis, Streptomyces speibonae, Streptomyces speleomycini, Streptomyces spheroids, Streptomyces spinoverrucosus, Streptomyces spiralis, Streptomyces spiroverticillatus, Streptomyces spitsbergensis, Streptomyces sporocinereus, Streptomyces sporoclivatus, Streptomyces spororaveus, Streptomyces sporoverrucosus, Streptomyces stelliscabiei, Streptomyces stramineus, Streptomyces subrutilus, Streptomyces sulfonofaciens, Streptomyces sulphurous, Streptomyces syringium, Streptomyces tanashiensis, Streptomyces tauricus, Streptomyces tendae, Streptomyces termitum, Streptomyces thermoalcalitolerans, Streptomyces thermoautotrophicus, Streptomyces thermocarboxydovorans, Streptomyces thermocarboxydus, Streptomyces thermocoprophilus, Streptomyces thermodiastaticus, Streptomyces thermogriseus, Streptomyces thermolineatus, Streptomyces thermonitrifcans, Streptomyces thermospinosisporus, Streptomyces thermoviolaceus subsp. apingens, Streptomyces thermoviolaceus subsp. thermoviolaceus, Streptomyces thermovulgaris, Streptomyces thioluteus, Streptomyces torulosus, Streptomyces toxytricini, Streptomyces tricolor, Streptomyces tubercidicus, Streptomyces tuirus, Streptomyces turgidiscabies, Streptomyces umbrinus, Streptomyces variabilis, Streptomyces variegates, Streptomyces varsoviensis, Streptomyces vastus, Streptomyces venezuelae, Streptomyces vinaceus, Streptomyces vinaceusdrappus, Streptomyces violaceochromogenes, Streptomyces violaceolatus, Streptomyces violaceorectus, Streptomyces violaceoruber, Streptomyces violaceorubidus, Streptomyces violaceus, Streptomyces violaceusniger, Streptomyces violarus, Streptomyces violascens, Streptomyces violatus, Streptomyces violens, Streptomyces virens, Streptomyces virginiae, Streptomyces viridiflavus, Streptomyces viridiviolaceus, Streptomyces viridobrunneus, Streptomyces viridochromogenes, Streptomyces viridodiastaticus, Streptomyces viridosporus, Streptomyces vitaminophileus, Streptomyces vitaminophilus, Streptomyces wedmorensis, Streptomyces werraensis, Streptomyces willmorei, Streptomyces xanthochromogenes, Streptomyces xanthocidicus, Streptomyces xantholiticus, Streptomyces xanthophaeus, Streptomyces yatensis, Streptomyces yerevanensis, Streptomyces yogyakartensis, Streptomyces yokosukanensis, Streptomyces yunnanensis, Streptomyces zaomyceticus, Streptoverticillium abikoense, Streptoverticillium albireticuli, Streptoverticillium alboverticillatum, Streptoverticillium album, Streptoverticillium ardum, Streptoverticillium aureoversale, Streptoverticillium aureoversile, Streptoverticillium baldaccii, Streptoverticillium biverticillatum, Streptoverticillium blastmyceticum, Streptoverticillium cinnamoneum subsp. albosporum, Streptomyces cinnamoneus subsp. albosporus, Streptoverticillium cinnamoneum subsp. cinnamoneum, Streptoverticillium cinnamoneum subsp. lanosum, Streptoverticillium cinnamoneum subsp. sparsum, Streptoverticillium distallicum, Streptoverticillium ehimense, Streptoverticillium eurocidicum, Streptoverticillium fervens subsp. fervens, Streptoverticillium fervens subsp. melrosporus, Streptoverticillium flavopersicum, Streptoverticillium griseocarneum, Streptoverticillium griseoverticillatum, Streptoverticillium hachijoense, Streptoverticillium hiroshimense, Streptoverticillium kashmirense, Streptoverticillium kentuckense, Streptoverticillium kishiwadense, Streptoverticillium ladakanum, Streptoverticillium lavenduligriseum, Streptoverticillium lilacinum, Streptoverticillium luteoverticillatum, Streptoverticillium mashuense, Streptoverticillium mobaraense, Streptoverticillium morookaense, Streptoverticillium netropsis, Streptoverticillium olivomycini, Streptomyces olivomycini, Streptoverticillium olivoreticuli subsp. cellulophilum, Streptoverticillium olivoreticuli subsp. olivoreticuli, Streptoverticillium olivoreticulum, Streptoverticillium olivoreticulum subsp. cellulophilum, Streptoverticillium olivoverticillatum, Streptoverticillium orinoci, Streptoverticillium parvisporogenes, Streptoverticillium parvisporogenum, Streptoverticillium rectiverticillatum, Streptoverticillium reticulum subsp. protomycicum, Streptoverticillium roseoverticillatum, Streptoverticillium salmonis, Streptoverticillium sapporonense, Streptovefticillium septatum, Streptoverticillium syringium, Streptoverticillium thioluteum, Streptoverticillium verticillium subsp. quantum, Streptoverticillium verticillium subsp. tsukushiense or Streptoverticillium viridoflavum.

[0108] Particular preferred strains are strains selected from the group consisting of Bacillaceae, Brevibacteriaceae, Corynebacteriaceae, Nocardiaceae, Mycobacteriaceae, Streptomycetaceae, Enterobacteriaceae such as Bacillus circulans, Bacillus subtilis, Bacillus sp., Brevibacterium albidum, Brevibacterium album, Brevibacterium cerinum, Brevibacterium flavum, Brevibacterium glutamigenes, Brevibacterium iodinum, Brevibacterium ketoglutamicum, Brevibacterium lactofermentum, Brevibacterium linens, Brevibacterium roseum, Brevibacterium saccharolyticum, Brevibacterium sp., Corynebacterium acetoacidophilum, Corynebacterium acetoglutamicum, Corynebacterium ammoniagenes, Corynebacterium glutamicum (=Micrococcus glutamicum), Corynebacterium melassecola, Corynebacterium sp., Nocardia rhodochrous (Rhodococcus rhodochrous), Mycobacterium rhodochrous, Streptomyces lividans and Escherichia coli especially Escherichia coli K12.

[0109] In addition particular preferred strains are strains selected from the group consisting of Cryptococcaceae, Saccharomycetaceae, Schizosaccharomycetacease such as the genera Candida, Hansenula, Pichia, Saccharomyces and Schizosaccharomyces preferred are strains selected from the group consisting of the species Rhodotorula rubra, Rhodotorula glutinis, Rhodotorula graminis, Yarrowia lipolytica, Sporobolomyces salmonicolor, Sporobolomyces shibatanus, Saccharomyces cerevisiae, Candida boidinii, Candida bombicola, Candida cylindracea, Candida parapsilosis, Candida rugosa, Candida tropicalis, Pichia methanolica and Pichia pastoris especially Saccharomyces cerevisiae.

[0110] Anacardiaceae such as the genera Pistacia, Mangifera, Anacardium e.g. the species Pistacia vera [pistachios, Pistazie], Mangifer indica [Mango] or Anacardium occidentale [Cashew]; Asteraceae such as the genera Calendula, Carthamus, Centaurea, Cichorium, Cynara, Helianthus, Lactuca, Locusta, Tagetes, Valeriana e.g. the species Calendula officinalis [Marigold], Carthamus tinctorius [safflower], Centaurea cyanus [cornflower], Cichorium intybus [blue daisy], Cynara scolymus [Artichoke], Helianthus annus [sunflower], Lactuca sativa, Lactuca crispa, Lactuca esculenta, Lactuca scariola L. ssp. sativa, Lactuca scariola L. var. integrata, Lactuca scariola L. var. integrifolia, Lactuca sativa subsp. romana, Locusta communis, Valeriana locusta [lettuce], Tagetes lucida, Tagetes erecta or Tagetes tenuifolia [Marigold]; Apiaceae such as the genera Daucus e.g. the species Daucus carota [carrot]; Betulaceae such as the genera Corylus e.g. the species Corylus avellana or Corylus colurna [hazelnut]; Boraginaceae such as the genera Borago e.g. the species Borago officinalis [borage]; Brassicaceae such as the genera Brassica, Melanosinapis, Sinapis, Arabadopsis e.g. the species Brassica napus, Brassica rapa ssp. [canola, oilseed rape, turnip rape], Sinapis arvensis, Brassica juncea, Brassica juncea var. juncea, Brassica juncea var. crispifolia, Brassica juncea var. foliosa, Brassica nigra, Brassica sinapioides, Melanosinapis communis [mustard], Brassica oleracea [fodder beet] or Arabidopsis thaliana; Bromeliaceae such as the genera Anana, Bromelia e.g. the species Anana comosus, Ananas ananas or Bromelia comosa [pineapple]; Caricaceae such as the genera Carica e.g. the species Carica papaya [papaya]; Cannabaceae such as the genera Cannabis e.g. the species Cannabis sative [hemp], Convolvulaceae such as the genera Ipomea, Convolvulus e.g. the species Ipomoea batatus, Ipomoea pandurata, Convolvulus batatas, Convolvulus tiliaceus, Ipomoea fastigiata, Ipomoea tiliacea, Ipomoea triloba or Convolvulus panduratus [sweet potato, Man of the Earth, wild potato], Chenopodiaceae such as the genera Beta, i.e. the species Beta vulgaris, Beta vulgaris var. altissima, Beta vulgaris var. Vulgaris, Beta maritima, Beta vulgaris var. perennis, Beta vulgaris var. conditiva or Beta vulgaris var. esculenta [sugar beet]; Cucurbitaceae such as the genera Cucurbita e.g. the species Cucurbita maxima, Cucurbita mixta, Cucurbita pepo or Cucurbita moschata [pumpkin, squash]; Elaeagnaceae such as the genera Elaeagnus e.g. the species Olea europaea [olive]; Ericaceae such as the genera Kalmia e.g. the species Kalmia latifolia, Kalmia angustifolia, Kalmia microphylla, Kalmia polifolia, Kalmia occidentalis, Cistus chamaerhodendros or Kalmia lucida [American laurel, broad-leafed laurel, calico bush, spoon wood, sheep laurel, alpine laurel, bog laurel, western bog-laurel, swamp-laurel]; Euphorbiaceae such as the genera Manihot, Janipha, Jatropha, Ricinus e.g. the species Manihot utilissima, Janipha manihot, Jatropha manihot, Manihot aipil, Manihot dulcis, Manihot manihot, Manihot melanobasis, Manihot esculenta [manihot, arrowroot, tapioca, cassava] or Ricinus communis [castor bean, Castor Oil Bush, Castor Oil Plant, Palma Christi, Wonder Tree]; Fabaceae such as the genera Pisum, Albizia, Cathormion, Feuillea, Inga, Pithecolobium, Acacia, Mimosa, Medicajo, Glycine, Dolichos, Phaseolus, Soja e.g. the species Pisum sativum, Pisum arvense, Pisum humile [pea], Albizia berteriana, Albizia julibrissin, Albizia lebbeck, Acacia berteriana, Acacia littoralis, Albizia berteriana, Albizzia berteriana, Cathormion berteriana, Feuillea berteriana, Inga fragrans, Pithecellobium berterianum, Pithecellobium fragrans, Pithecolobium berterianum, Pseudalbizzia berteriana, Acacia julibrissin, Acacia nemu, Albizia nemu, Feuilleea julibrissin, Mimosa julibrissin, Mimosa speciosa, Sericanrda julibrissin, Acacia lebbeck, Acacia macrophylla, Albizia lebbek, Feuilleea lebbeck, Mimosa lebbeck, Mimosa speciosa [bastard logwood, silk tree, East Indian Walnut], Medicago sativa, Medicago falcata, Medicago varia [alfalfa] Glycine max Dolichos soja, Glycine gracilis, Glycine hispida, Phaseolus max, Soja hispida or Soja max [soybean]; Geraniaceae such as the genera Pelargonium, Cocos, Oleum e.g. the species Cocos nucifera, Pelargonium grossularioides or Oleum cocois [coconut]; Gramineae such as the genera Saccharum e.g. the species Saccharum officinarum; Juglandaceae such as the genera Juglans, Wallia e.g. the species Juglans regia, Juglans ailanthifolia, Juglans sieboldiana, Juglans cinerea, Wallia cinerea, Juglans bixbyi, Juglans californica, Juglans hindsii, Juglans intermedia, Juglans jamaicensis, Juglans major, Juglans microcarpa, Juglans nigra or Wallia nigra [walnut, black walnut, common walnut, persian walnut, white walnut, butternut, black walnut]; Lauraceae such as the genera Persea, Laurus e.g. the species laurel Laurus nobilis [bay, laurel, bay laurel, sweet bay], Persea americana, Persea americana, Persea gratissima or Persea persea [avocado]; Leguminosae such as the genera Arachis e.g. the species Arachis hypogaea [peanut]; Linaceae such as the genera Linum, Adenolinum e.g. the species Linum usitatissimum, Linum humile, Linum austriacum, Linum bienne, Linum angustifolium, Linum catharticum, Linum flavum, Linum grandiflorum, Adenolinum grandiflorum, Linum lewisii, Linum narbonense, Linum perenne, Linum perenne var. lewisii, Linum pratense or Linum trigynum [flax, linseed]; Lythrarieae such as the genera Punica e.g. the species Punica granatum [pomegranate]; Malvaceae such as the genera Gossypium e.g. the species Gossypium hirsutum, Gossypium arboreum, Gossypium barbadense, Gossypium herbaceum or Gossypium thurberi [cotton]; Musaceae such as the genera Musa e.g. the species Musa nana, Musa acuminata, Musa paradisiaca, Musa spp. [banana]; Onagraceae such as the genera Camissonia, Oenothera e.g. the species Oenothera biennis or Camissonia brevipes [primrose, evening primrose]; Palmae such as the genera Elacis e.g. the species Elaeis guineensis [oil plam]; Papaveraceae such as the genera Papaver e.g. the species Papaver orientale, Papaver rhoeas, Papaver dubium [poppy, oriental poppy, corn poppy, field poppy, shirley poppies, field poppy, long-headed poppy, long-pod poppy]; Pedaliaceae such as the genera Sesamum e.g. the species Sesamum indicum [sesame]; Piperaceae such as the genera Piper, Artanthe, Peperomia, Steffensia e.g. the species Piper aduncum, Piper amalago, Piper angustifolium, Piper auritum, Piper betel, Piper cubeba, Piper longum, Piper nigrum, Piper retrofractum, Artanthe adunca, Artanthe elongata, Peperomia elongata, Piper elongatum, Steffensia elongata. [Cayenne pepper, wild pepper]; Poaceae such as the genera Hordeum, Secale, Avena, Sorghum, Andropogon, Holcus, Panicum, Oryza, Zea, Triticum e.g. the species Hordeum vulgare, Hordeum jubatum, Hordeum murinum, Hordeum secalinum, Hordeum distichon Hordeum aegiceras, Hordeum hexastichon, Hordeum hexastichum, Hordeum irregulare, Hordeum sativum, Hordeum secalinum [barley, pearl barley, foxtail barley, wall barley, meadow barley], Secale cereale [rye], Avena sativa, Avena fatua, Avena byzantina, Avena fatua var. sativa, Avena hybrida [oat], Sorghum bicolor, Sorghum halepense, Sorghum saccharatum, Sorghum vulgare, Andropogon drummondii, Holcus bicolor, Holcus sorghum, Sorghum aethiopicum, Sorghum arundinaceum, Sorghum caffrorum, Sorghum cernuum, Sorghum dochna, Sorghum drummondii, Sorghum durra, Sorghum guineense, Sorghum lanceolatum, Sorghum nervosum, Sorghum saccharatum, Sorghum subglabrescens, Sorghum verticilliflorum, Sorghum vulgare, Holcus halepensis, Sorghum miliaceum millet, Panicum militaceum [Sorghum, millet], Oryza sativa, Oryza latifolia [rice], Zea mays [corn, maize] Triticum aestivum, Triticum durum, Triticum turgidum, Triticum hybernum, Triticum macha, Triticum sativum or Triticum vulgare [wheat, bread wheat, common wheat], Proteaceae such as the genera Macadamia e.g. the species Macadamia intergrifolia [macadamia); Rubiaceae such as the genera Coffea e.g. the species Coffea spp., Coffea arabica, Coffea canephora or Coffea liberica [coffee]; Scrophulariaceae such as the genera Verbascum e.g. the species Verbascum blattaria, Verbascum chaixii, Verbascum densiflorum, Verbascum lagurus, Verbascum longifolium, Verbascum lychnitis, Verbascum nigrum, Verbascum olympicum, Verbascum phlomoides, Verbascum phoenicum, Verbascum pulverulentum or Verbascum thapsus [mullein, white moth mullein, nettle-leaved mullein, dense-flowered mullein, silver mullein, long-leaved mullein, white mullein, dark mullein, greek mullein, orange mullein, purple mullein, hoary mullein, great mullein]; Solanaceae such as the genera Capsicum, Nicotiana, Solanum, Lycopersicon e.g. the species Capsicum annuum, Capsicum annuum var. glabriusculum, Capsicum frutescens [pepper], Capsicum annuum [paprika], Nicotiana tabacum, Nicotiana alata, Nicotiana attenuata, Nicotiana glauca, Nicotiana langsdorffi, Nicotiana obtusifolia, Nicotiana quadrivalvis, Nicotiana repanda, Nicotiana rustica, Nicotiana sylvestris [tobacco], Solanum tuberosum [potato], Solanum melongena [egg-plant] (Lycopersicon esculentum, Lycopersicon lycopersicum, Lycopersicon pyriforme, Solanum integrifolium or Solanum lycopersicum [tomato]; Sterculiaceae such as the genera Theobroma e.g. the species Theobroma cacao [cacao]; Theaceae such as the genera Camellia e.g. the species Camellia sinensis) [tea]. All abovementioned organisms can in princible also function as host organisms.

[0111] Particular preferred plants are plants selected from the group consisting of Asteraceae such as the genera Helianthus, Tagetes e.g. the species Helianthus annus [sunflower], Tagetes lucida, Tagetes erecta or Tagetes tenuifolia [Marigold]; Brassicaceae such as the genera Brassica, Arabadopsis e.g. the species Brassica napus, Brassica rapa ssp., Brassica juncea [canola, oilseed rape, turnip rape] or Arabidopsis thaliana; Fabaceae such as the genera Glycine e.g. the species Glycine max, Soja hispida or Soja max [soybean]; Linaceae such as the genera Linum e.g. the species Linum usitatissimum, [flax, linseed]; Poaceae such as the genera Hordeum, Secale, Avena, Sorghum, Oryza, Zea, Triticum e.g. the species Hordeum vulgare [barley]; Secale cereale [rye], Avena sativa, Avena fatua, Avena byzantina, Avena fatua var. sativa, Avena hybrida [oat], Sorghum bicolor [Sorghum, millet], Oryza sativa, Oryza latifolia [rice], Zea mays [corn, maize] Triticum aestivum, Triticum durum, Triticum turgidum, Triticum hybernum, Triticum macha, Triticum sativum or Triticum vulgare [wheat, bread wheat, common wheat]; Solanaceae such as the genera Solanum, Lycopersicon e.g. the species Solanum tuberosum [potato], Lycopersicon esculentum, Lycopersicon lycopersicum, Lycopersicon pyriforme, Solanum integrifolium or Solanum lycopersicum [tomato].

[0112] All abovementioned organisms can in princible also function as host organisms.

[0113] With regard to the nucleic acid sequence as depicted below a nucleic acid construct which contains a nucleic acid sequence mentioned herein or an organism (=transgenic organism) which is transformed with said nucleic acid sequence or said nucleic acid construct, “transgene” means all those constructs which have been brought about by genetic manipulation methods, preferably in which either
[0114] a) the nucleic acid sequence as depicted in SEQ ID NO: 1, 3, 5, 7, 9, 11, 13, 15, 17, 19, 21, 23, 25, 27, 29, 31, 33, 35, 37, 39, 41, 43, 45, 55, 57, 59, 61, 63, 65, 67, 69, 71, 73, 75, 77, 79, 81, 83, 85, 87, 89, 91, 93, 95, 97, 99, 101, 103, 105, 107, 109, 111, 113, 115, 117, 119, 121, 123, 125, 127, 129, 131, 133, 135, 137, 139, 141, 143, 145, 147, 149, 151, 153, 155, 157, 159, 161, 163, 165, 167, 169, 171, 173, 175, 177, 179, 181, 183, 185, 187, 189, 191, 193, 195, 197, 199, 201, 203, 205, 207, 209, 211, 213, 215, 217, 219, 221, 223, 225, 227, 229, 231, 233, 235, 237, 239, 241, 243, 245, 247, 249, 251, 253, 255, 257, 259, 261, 263, 265, 267, 269, 271, 273, 275, 277, 279, 281, 283, 285, 287, 289, 291, 293, 295, 297, 299, 301, 303, 305, 307, 309, 311, 313, 315, 317, 319, 321, 323, 325, 327, 329, 331, 333, 335, 337, 339, 341, 343, 345, 347, 349, 351, 353, 355, 357, 359, 361, 363, 365, 367, 369, 371, 373, 375, 377, 379, 381, 383, 385, 387, 389, 391 or 393 or a derivative thereof, or
[0115] b) a genetic regulatory element, for example a promoter, which is functionally linked to the nucleic acid sequence as depicted in SEQ ID NO: 1, 3, 5, 7, 9, 11, 13, 15, 17, 19, 21, 23, 25, 27, 29, 31, 33, 35, 37, 39, 41, 43, 45, 55, 57, 59, 61, 63, 65, 67, 69, 71, 73, 75, 77, 79, 81, 83, 85, 87, 89, 91, 93, 95, 97, 99, 101, 103, 105, 107, 109, 111, 113, 115, 117, 119, 121, 123, 125, 127, 129, 131, 133, 135, 137, 139, 141, 143, 145, 147, 149, 151, 153, 155, 157, 159, 161, 163, 165, 167, 169, 171, 173, 175, 177, 179, 181, 183, 185, 187, 189, 191, 193, 195, 197, 199, 201, 203, 205, 207, 209, 211, 213, 215, 217, 219, 221, 223, 225, 227, 229, 231, 233, 235, 237, 239, 241, 243, 245, 247, 249, 251, 253, 255, 257, 259, 261, 263, 265, 267, 269, 271, 273, 275, 277, 279, 281, 283, 285, 287, 289, 291, 293, 295, 297, 299, 301, 303, 305, 307, 309, 311, 313, 315, 317, 319, 321, 323, 325, 327, 329, 331, 333, 335, 337, 339, 341, 343, 345, 347, 349, 351, 353, 355, 357, 359, 361, 363, 365, 367, 369, 371, 373, 375, 377, 379, 381, 383, 385, 387, 389, 391 or 393 or a derivative thereof, or
[0116] c) (a) and (b)
   is/are not present in its/their natural genetic environment or has/have been modified by means of genetic manipulation methods, it being possible for the modification to be, by way of example, a substitution, addition, deletion, inversion or insertion of one or more nucleotide. “Natural genetic environment” means the natural chromosomal locus in the organism of origin or the presence in a genomic library. In the case of a genomic library, the natural, genetic environment of the nucleic acid sequence is preferably at least partially still preserved. The environment flanks the nucleic acid sequence at least on one side and has a sequence length of at least 50 bp, preferably at least 500 bp, particularly preferably at least 1000 bp, very particularly preferably at least 5000 bp.

[0117] The use of the nucleic acid sequence according to the invention or of the nucleic acid construct according to the invention for the generation of transgenic plants is therefore also subject matter of the invention.

[0118] The fine chemical, which is synthesized in the organism, in particular the microorganism, the cell, the tissue or the plant, of the invention can be isolated if desired. Depending on the use of the fine chemical, different purities resulting from the purification may be advantageous as will be described herein below.

[0119] In an advantageous embodiment of the invention, the organism takes the form of a plant whose fine chemical content is modified advantageously owing to the nucleic acid molecule of the present invention expressed. This is important for plant breeders since, for example, the nutritional value of organisms such as a plant is very often limited by its amino acid, protein, co-factor and/or vitamin content to mention only a couple of them. For example in feed for monogastric animals a few essential amino acids such as lysine, threonine or methionine are very often limiting. After the biological activity of the nucleic acid and/or protein of the invention has been increased or generated, or after the expression of nucleic acid molecule or polypeptide according to the invention has been generated or increased, the transgenic plant generated thus is grown on or in a nutrient medium or else in the soil and subsequently harvested.

[0120] The plants or parts thereof, e.g. the leaves, roots, flowers, and/or stems and/or other harvestable material as described below, can then be used directly as foodstuffs or animal feeds or else be further processed. Again, the amino acids can be purified further in the customary manner via extraction and precipitation or via ion exchangers and other methods known to the person skilled in the art and described herein below. Products which are suitable for various applications and which result from these different processing procedures are for example amino acids or amino acid compositions which can still comprise further plant components in different amounts, advantageously in the range of from 0 to 99% by weight or more, preferably from below 90%, 80%, 70%, 60% or 50% by weight, especially preferably below 40%, 30%, 20% or 10% by weight. The plants can also advantageously be used directly without further processing, e.g. as feed or for extraction.

[0121] The chemically pure fine chemical or chemically pure compositions comprising the fine chemical may also be produced by the process described above. To this end, the fine chemical or the compositions are isolated in the known manner from an organism according to the invention, such as the microorganisms, non-human animal or the plants, and/or their culture medium in which or on which the organisms had been grown. These chemically pure fine chemical or said compositions are advantageous for applications in the field of the food industry, the cosmetics industry or the pharmaceutical industry.

[0122] Thus, the content of plant components and preferably also further impurities is as low as possible, and the abovementioned fine chemical are obtained in as pure form as possible. In these applications, the content of plant components advantageously amounts to less than 10% by weight, preferably 1% by weight, more preferably 0.1% by weight, very especially preferably 0.01% by weight or less.

[0123] Accordingly, the fine chemical produced by the present invention is at least 0.1% by weight pure, preferably more than 1% by weight pure, more preferred 10% by weight pure, even more preferred are more than 50%, 60%, 70% or 80% by weight pure, even more preferred are more than 90%, 91%, 92%, 93%, 94% or 95% weight pure, most preferred are 96%, 97%, 98% or 99% by weight or more pure.

[0124] In this context, the amount of the fine chemical in a cell of the invention may be increased according to the process of the invention by at least a factor of 1.1, preferably at least a factor of 1.5; 2; or 5, especially preferably by at least a factor of 10 or 30, very especially preferably by at least a factor of 50, in comparison with the wild type, control or reference. Preferrably, said increase is found in a tissue of an organism, more preferred in the organism itself or in a harvestable part thereof.

[0125] In principle, the fine chemicals produced can be increased in two ways by the process according to the invention. The pool of free fine chemicals, in particular of the free fine chemical, and/or the content of bound for example protein-bound fine chemicals, in particular of the protein-bound fine chemical may advantageously be increased.

[0126] It may be advantageous to increase the pool of free fine chemical in the transgenic organisms by the process according to the invention in order to isolate high amounts of the pure fine chemical.

[0127] In another preferred embodiment of the invention a combination of the increased expression of the nucleic acid sequence or the protein of the invention together with the transformation of a protein or polypeptid, which functions as a sink for the desired fine chemical such as an amino acid for example methionine, lysine or threonine in the organism is useful to increase the production of the fine chemical (see U.S. Pat. No. 5,589,616, WO 96/38574, WO 97/07665, WO 97/28247, U.S. Pat. No. 4,886,878, U.S. Pat. No. 5,082,993 and U.S. Pat. No. 5,670,635). Galili et al. [Transgenic Res. 2000] showed, that enhancing the synthesis of threonine by a feed back insensitive aspertate kinase did not lead only to in increase in free threonine but also in protein bound threonine.

[0128] In may also be advantageous to increase the content of the bound fine chemical.

[0129] In a preferred embodiment, the fine chemical is produced in accordance with the invention and, if desired, is isolated. The production of further fine chemicals for example amino acids such as lysine and of amino acid mixtures by the process according to the invention is advantageous.

[0130] In the case of the fermentation of microorganisms, the abovementioned fine chemical e.g. amino acid or mixtures of amino acids may accumulate in the medium and/or the cells. If microorganisms are used in the process according to the invention, the fermentation broth can be processed after the cultivation. Depending on the requirement, all or some of the biomass can be removed from the fermentation broth by separation methods such as, for example, centrifugation, filtration, decanting or a combination of these methods, or else the biomass can be left in the fermentation broth. The fermentation broth can subsequently be reduced, or concentrated, with the aid of known methods such as, for example, rotary evaporator, thin-layer evaporator, falling film evaporator, by reverse osmosis or by nanofiltration. This concentrated fermentation broth can subsequently be processed by lyophilization, spray drying, spray granulation or by other methods.

[0131] To purify a fine chemical such as an amino acid, a product-containing fermentation broth from which the biomass has been separated may be subjected to chromatography with a suitable resin such as ion exchange resin for example anion or cation exchange resin, hydrophobic resin or hydrophilic resin for example epoxy resin, polyurethane resin or polyacrylamid resin, or resin for separation according to the molecular weight of the compounds for example polyvinyl chloride homopolymer resin or resins composed for example of polymers of acrylic acid, crosslinked with polyalkenyl ethers or divinyl glycol such as Carbopol®, Pemulen® and Noveon®. If necessary these chromatography steps may be repeated using the same or other chromatography resins. The skilled worker is familiar with the choice of suitable chromatography resins and their most effective use. The purified product may be concentrated by filtration or ultrafiltration and stored at a temperature, which ensures the maximum stability of the product.

[0132] The identity and purity of the compound(s) isolated can be determined by prior-art techniques. They encompass high-performance liquid chromatography (HPLC), spectroscopic methods, mass spectrometry (MS), staining methods, thin-layer chromatography, NIRS, enzyme assays or microbiological assays. These analytical methods are compiled in: Patek et al. (1994) Appl. Environ. Microbiol. 60:133-140; Malakhova et al. (1996) Biotekhnologiya 11 27-32; and Schmidt et al. (1998) Bioprocess Engineer. 19:67-70. Ulmann's Encyclopedia of Industrial Chemistry (1996) Bd. A27, VCH Weinheim, pp. 89-90, pp. 521-540, pp. 540-547, pp. 559-566, 575-581 and pp. 581-587; Michal, G (1999) Biochemical Pathways: An Atlas of Biochemistry and Molecular Biology, John Wiley and Sons; Fallon, A. et al. (1987) Applications of HPLC in Biochemistry in: Laboratory Techniques in Biochemistry and Molecular Biology, vol. 17.

[0133] Fine chemicals like amino acids can for example be detected advantageously via HPLC separation in ethanolic extract as described by Geigenberger et al. (Plant Cell & Environ, 19, 1996: 43-55). Amino acids can be extracted with hot water. After filtration the extracts are diluted with water containing 20 mg/mL sodium acide. The separation and detection of the amino acids is performed using an anion exchange column and an electrochemical detector. Technical details can be taken from Y. Ding et al., 2002, Direct determination of free amino acids and sugars in green tea by anion-exchange chromatography with integrated pulsed amperometric detection, J Chromatogr A, (2002) 982; 237-244, or e.g. from Karchi et al., 1993, Plant J. 3: 721-727; Matthews M J, 1997 (Lysine, threonine and methionine biosynthesis. In B K Singh, ed, Plant Amino Acids: Biochemistry and Biotechnology. Dekker, New York, pp 205-225; H Hesse and R Hoefgen. (2003) Molecular aspects of methionine biosynthesis. TIPS 8(259-262.

[0134] In a preferred embodiment, the present invention relates to a process for the production of the fine chemical comprising or generating in an organism or a part thereof the expression of at least one nucleic acid molecule comprising a nucleic acid molecule selected from the group consisting of:
[0135] a) nucleic acid molecule encoding, preferably at least the mature form, of the polypeptide as depicted in SEQ ID NO: 2, 4, 6, 8, 10, 12, 14, 16, 18, 20, 22, 24, 26, 28, 30, 32, 34, 36, 38, 40, 42, 44, 46, 56, 58, 60, 62, 64, 66, 68, 70, 72, 74, 76, 78, 80, 82, 84, 86, 88, 90, 92, 94, 96, 98, 100, 102, 104, 106, 108, 110, 112, 114, 116, 118, 120, 122, 124, 126, 128, 130, 132, 134, 136, 138, 140, 142, 144, 146, 148, 150, 152, 154, 156, 158, 160, 162, 164, 166, 168, 170, 172, 174, 176, 178, 180, 182, 184, 186, 188, 190, 192, 194, 196, 198, 200, 202, 204, 206, 208, 210, 212, 214, 216, 218, 220, 222, 224, 226, 228, 230, 232, 234, 236, 238, 240, 242, 244, 246, 248, 250, 252, 254, 256, 258, 260, 262, 264, 266, 268, 270, 272, 274, 276, 278, 280, 282, 284, 286, 288, 290, 292, 294, 296, 298, 300, 302, 304, 306, 308, 310, 312, 314, 316, 318, 320, 322, 324, 326, 328, 330, 332, 334, 336, 338, 340, 342, 344, 346, 348, 350, 352, 354, 356, 358, 360, 362, 364, 366, 368, 370, 372, 374, 376, 378, 380, 382, 384, 386, 388, 390, 392 or 394 or a fragment thereof, which confers an increase in the amount of the fine chemical in an organism or a part thereof;
[0136] b) nucleic acid molecule comprising, preferably at least the mature form, of the nucleic acid molecule as depicted in SEQ ID NO: 1, 3, 5, 7, 9, 11, 13, 15, 17, 19, 21, 23, 25, 27, 29, 31, 33, 35, 37, 39, 41, 43, 45, 55, 57, 59, 61, 63, 65, 67, 69, 71, 73, 75, 77, 79, 81, 83, 85, 87, 89, 91, 93, 95, 97, 99, 101, 103, 105, 107, 109, 111, 113, 115, 117, 119, 121, 123, 125, 127, 129, 131, 133, 135, 137, 139, 141, 143, 145, 147, 149, 151, 153, 155, 157, 159, 161, 163, 165, 167, 169, 171, 173, 175, 177, 179, 181, 183, 185, 187, 189, 191, 193, 195, 197, 199, 201, 203, 205, 207, 209, 211, 213, 215, 217, 219, 221, 223, 225, 227, 229, 231, 233, 235, 237, 239, 241, 243, 245, 247, 249, 251, 253, 255, 257, 259, 261, 263, 265, 267, 269, 271, 273, 275, 277, 279, 281, 283, 285, 287, 289, 291, 293, 295, 297, 299, 301, 303, 305, 307, 309, 311, 313, 315, 317, 319, 321, 323, 325, 327, 329, 331, 333, 335, 337, 339, 341, 343, 345, 347, 349, 351, 353, 355, 357, 359, 361, 363, 365, 367, 369, 371, 373, 375, 377, 379, 381, 383, 385, 387, 389, 391 or 393;
[0137] c) nucleic acid molecule whose sequence can be deduced from a polypeptide sequence encoded by a nucleic acid molecule of (a) or (b) as result of the degeneracy of the genetic code and conferring an increase in the amount of the fine chemical in an organism or a part thereof;
[0138] d) nucleic acid molecule encoding a polypeptide which has at least 50% identity with the amino acid sequence of the polypeptide encoded by the nucleic acid molecule of (a) to (c) and conferring an increase in the amount of the fine chemical in an organism or a part thereof;
[0139] e) nucleic acid molecule which hybidizes with a nucleic acid molecule of (a) to (c) under under stringent hybridisation conditions and conferring an increase in the amount of the fine chemical in an organism or a part thereof;
[0140] f) nucleic acid molecule encoding a polypeptide, the polypeptide being derived by substituting, deleting and/or adding one or more amino acids of the amino acid sequence of the polypeptide encoded by the nucleic acid molecules (a) to (d), preferably to (a) to (c) and conferring an increase in the amount of the fine chemical in an organism or a part thereof;
[0141] g) nucleic acid molecule encoding a fragment or an epitope of a polypeptide which is encoded by one of the nucleic acid molecules of (a) to (e), preferably to (a) to (c) and conferring an increase in the amount of the fine chemical in an organism or a part thereof;
[0142] h) nucleic acid molecule comprising a nucleic acid molecule which is obtained by amplifying nucleic acid molecules from a cDNA library or a genomic library using the primers as depicted in SEQ ID NO: 53 or SEQ ID NO: 54 and conferring an increase in the amount of the fine chemical in an organism or a part thereof;
[0143] i) nucleic acid molecule encoding a polypeptide which is isolated, e.g. from an expression library, with the aid of monoclonal antibodies against a polypeptide encoded by one of the nucleic acid molecules of (a) to (h), preferably to (a) to (c), and and conferring an increase in the amount of the fine chemical in an organism or a part thereof;
[0144] j) nucleic acid molecule which encodes a polypeptide comprising the consensus sequence as depicted in SEQ ID NO: 47, SEQ ID NO: 48, SEQ ID NO: 49, SEQ ID NO: 50, SEQ ID NO: 51, SEQ ID NO: 52, SEQ ID NO: 397, SEQ ID NO: 398, SEQ ID NO: 399 and/or SEQ ID NO: 400 and conferring an increase in the amount of the fine chemical in an organism or a part thereof; and/or
[0145] k) nucleic acid molecule which is obtainable by screening a suitable library under stringent conditions with a probe comprising one of the sequences of the nucleic acid molecule of (a) to a), preferably to (a) to (c), or with a fragment of at least 15 nt, preferably 20 nt, 30 nt, 50 nt, 100 nt, 200 nt or 500 nt of the nucleic acid molecule characterized in (a) to (j), preferably to (a) to (c), and conferring an increase in the amount of the fine chemical in an organism or a part thereof;
   or which comprises a sequence which is complementary thereto.

[0146] In one embodiment, the nucleic acid molecule used in the process distinguishes over the sequence as depicted in SEQ ID NO: 1, 55, 57, 59, 61, 63, 65, 67, 69, 71, 73, 75, 77, 79, 81, 83, 85, 87, 89, 91, 93, 95, 97, 99, 101, 103, 105, 107, 109, 111, 113, 115, 117, 119, 121, 123, 125, 127, 129, 131, 133, 135, 137, 139, 141, 143, 145, 147, 149, 151, 153, 155, 157, 159, 161, 163, 165, 167, 169, 171, 173, 175, 177, 179, 181, 183, 185, 187, 189, 191, 193, 195, 197, 199, 201, 203, 205, 207, 209, 211, 213, 215, 217, 219, 221, 223, 225, 227, 229, 231, 233, 235, 237, 239, 241, 243, 245, 247, 249, 251, 253, 255, 257, 259, 261, 263, 265, 267, 269, 271, 273, 275, 277, 279, 281, 283, 285, 287, 289, 291, 293, 295, 297, 299, 301, 303, 305, 307, 309, 311, 313, 315, 317, 319, 321, 323, 325, 327, 329, 331, 333, 335, 337, 339, 341, 343, 345, 347, 349, 351, 353, 355, 357, 359, 361, 363, 365, 367, 369, 371, 373, 375, 377, 379, 381, 383, 385, 387, 389, 391 or 393 by one or more nucleotides or does not consist of the sequence as depicted in SEQ ID NO: 1, 55, 57, 59, 61, 63, 65, 67, 69, 71, 73, 75, 77, 79, 81, 83, 85, 87, 89, 91, 93, 95, 97, 99, 101, 103, 105, 107, 109, 111, 113, 115, 117, 119, 121, 123, 125, 127, 129, 131, 133, 135, 137, 139, 141, 143, 145, 147, 149, 151, 153, 155, 157, 159, 161, 163, 165, 167, 169, 171, 173, 175, 177, 179, 181, 183, 185, 187, 189, 191, 193, 195, 197, 199, 201, 203, 205, 207, 209, 211, 213, 215, 217, 219, 221, 223, 225, 227, 229, 231, 233, 235, 237, 239, 241, 243, 245, 247, 249, 251, 253, 255, 257, 259, 261, 263, 265, 267, 269, 271, 273, 275, 277, 279, 281, 283, 285, 287, 289, 291, 293, 295, 297, 299, 301, 303, 305, 307, 309, 311, 313, 315, 317, 319, 321, 323, 325, 327, 329, 331, 333, 335, 337, 339, 341, 343, 345, 347, 349, 351, 353, 355, 357, 359, 361, 363, 365, 367, 369, 371, 373, 375, 377, 379, 381, 383, 385, 387, 389, 391 or 393. In one embodiment, the nucleic acid molecule of the present invention is less than 100%, 99.999%, 99.99%, 99.9% or 99% identical to the sequence as depicted in SEQ ID NO: 1, 55, 57, 59, 61, 63, 65, 67, 69, 71, 73, 75, 77, 79, 81, 83, 85, 87, 89, 91, 93, 95, 97, 99, 101, 103, 105, 107, 109, 111, 113, 115, 117, 119, 121, 123, 125, 127, 129, 131, 133, 135, 137, 139, 141, 143, 145, 147, 149, 151, 153, 155, 157, 159, 161, 163, 165, 167, 169, 171, 173, 175, 177, 179, 181, 183, 185, 187, 189, 191, 193, 195, 197, 199, 201, 203, 205, 207, 209, 211, 213, 215, 217, 219, 221, 223, 225, 227, 229, 231, 233, 235, 237, 239, 241, 243, 245, 247, 249, 251, 253, 255, 257, 259, 261, 263, 265, 267, 269, 271, 273, 275, 277, 279, 281, 283, 285, 287, 289, 291, 293, 295, 297, 299, 301, 303, 305, 307, 309, 311, 313, 315, 317, 319, 321, 323, 325, 327, 329, 331, 333, 335, 337, 339, 341, 343, 345, 347, 349, 351, 353, 355, 357, 359, 361, 363, 365, 367, 369, 371, 373, 375, 377, 379, 381, 383, 385, 387, 389, 391 or 393. In another embodiment, the nucleic acid molecule does not encode a polypeptide of the sequence as depicted in SEQ ID NO: 2, 56, 58, 60, 62, 64, 66, 68, 70, 72, 74, 76, 78, 80, 82, 84, 86, 88, 90, 92, 94, 96, 98, 100, 102, 104, 106, 108, 110, 112, 114, 116, 118, 120, 122, 124, 126, 128, 130, 132, 134, 136, 138, 140, 142, 144, 146, 148, 150, 152, 154, 156, 158, 160, 162, 164, 166, 168, 170, 172, 174, 176, 178, 180, 182, 184, 186, 188, 190, 192, 194, 196, 198, 200, 202, 204, 206, 208, 210, 212, 214, 216, 218, 220, 222, 224, 226, 228, 230, 232, 234, 236, 238, 240, 242, 244, 246, 248, 250, 252, 254, 256, 258, 260, 262, 264, 266, 268, 270, 272, 274, 276, 278, 280, 282, 284, 286, 288, 290, 292, 294, 296, 298, 300, 302, 304, 306, 308, 310, 312, 314, 316, 318, 320, 322, 324, 326, 328, 330, 332, 334, 336, 338, 340, 342, 344, 346, 348, 350, 352, 354, 356, 358, 360, 362, 364, 366, 368, 370, 372, 374, 376, 378, 380, 382, 384, 386, 388, 390, 392 or 394. In another embodiment, the nucleic acid molecule does not encode a polypeptide of the sequence of the present invention is less than 100%, 99.999%, 99.99%, 99.9% or 99% identical to the sequence as depicted in SEQ ID NO: 2, 56, 58, 60, 62, 64, 66, 68, 70, 72, 74, 76, 78, 80, 82, 84, 86, 88, 90, 92, 94, 96, 98, 100, 102, 104, 106, 108, 110, 112, 114, 116, 118, 120, 122, 124, 126, 128, 130, 132, 134, 136, 138, 140, 142, 144, 146, 148, 150, 152, 154, 156, 158, 160, 162, 164, 166, 168, 170, 172, 174, 176, 178, 180, 182, 184, 186, 188, 190, 192, 194, 196, 198, 200, 202, 204, 206, 208, 210, 212, 214, 216, 218, 220, 222, 224, 226, 228, 230, 232, 234, 236, 238, 240, 242, 244, 246, 248, 250, 252, 254, 256, 258, 260, 262, 264, 266, 268, 270, 272, 274, 276, 278, 280, 282, 284, 286, 288, 290, 292, 294, 296, 298, 300, 302, 304, 306, 308, 310, 312, 314, 316, 318, 320, 322, 324, 326, 328, 330, 332, 334, 336, 338, 340, 342, 344, 346, 348, 350, 352, 354, 356, 358, 360, 362, 364, 366, 368, 370, 372, 374, 376, 378, 380, 382, 384, 386, 388, 390, 392 or 394. In another embodiment, the nucleic acid molecule encodes a polypeptide of the sequence as depicted in SEQ ID NO: 2, 56, 58, 60, 62, 64, 66, 68, 70, 72, 74, 76, 78, 80, 82, 84, 86, 88, 90, 92, 94, 96, 98, 100, 102, 104, 106, 108, 110, 112, 114, 116, 118, 120, 122, 124, 126, 128, 130, 132, 134, 136, 138, 140, 142, 144, 146, 148, 150, 152, 154, 156, 158, 160, 162, 164, 166, 168, 170, 172, 174, 176, 178, 180, 182, 184, 186, 188, 190, 192, 194, 196, 198, 200, 202, 204, 206, 208, 210, 212, 214, 216, 218, 220, 222, 224, 226, 228, 230, 232, 234, 236, 238, 240, 242, 244, 246, 248, 250, 252, 254, 256, 258, 260, 262, 264, 266, 268, 270, 272, 274, 276, 278, 280, 282, 284, 286, 288, 290, 292, 294, 296, 298, 300, 302, 304, 306, 308, 310, 312, 314, 316, 318, 320, 322, 324, 326, 328, 330, 332, 334, 336, 338, 340, 342, 344, 346, 348, 350, 352, 354, 356, 358, 360, 362, 364, 366, 368, 370, 372, 374, 376, 378, 380, 382, 384, 386, 388, 390, 392 or 394 and distinguishes over said sequence by one or more amino acids preferably by 1, 2, 3, 4, 5, 6, 7, 8, 9 or 10 amino acids. In further another advantageously embodiment, the nucleic acid molecule used in the process distinguishes over the sequence as depicted in SEQ ID NO: 3, SEQ ID NO: 5, SEQ ID NO: 7, SEQ ID NO: 9, SEQ ID NO: 11, SEQ ID NO: 13, SEQ ID NO: 15, SEQ ID NO: 17, SEQ ID NO: 19, SEQ ID NO: 21, SEQ ID NO: 23, SEQ ID NO: 25, SEQ ID NO: 27, SEQ ID NO: 29, SEQ ID NO: 31, SEQ ID NO: 33, SEQ ID NO: 35, SEQ ID NO: 37, SEQ ID NO: 39, SEQ ID NO: 41 SEQ ID NO: 43 or SEQ ID NO: 45 by one or more nucleotides or does not consist of the sequence as depicted in SEQ ID NO: 3, SEQ ID NO: 5, SEQ ID NO: 7, SEQ ID NO: 9, SEQ ID NO: 11, SEQ ID NO: 13, SEQ ID NO: 15, SEQ ID NO: 17, SEQ ID NO: 19, SEQ ID NO: 21, SEQ ID NO: 23, SEQ ID NO: 25, SEQ ID NO: 27, SEQ ID NO: 29, SEQ ID NO: 31, SEQ ID NO: 33, SEQ ID NO: 35, SEQ ID NO: 37, SEQ ID NO: 39, SEQ ID NO: 41 SEQ ID NO: 43 or SEQ ID NO: 45. In one advantageously embodiment, the nucleic acid molecule of the present invention is less than 100%, 99.999%, 99.99%, 99.9% or 99% identical to the sequence as depicted in SEQ ID NO: 3, SEQ ID NO: 5, SEQ ID NO: 7, SEQ ID NO: 9, SEQ ID NO: 11, SEQ ID NO: 13, SEQ ID NO: 15, SEQ ID NO: 17, SEQ ID NO: 19, SEQ ID NO: 21, SEQ ID NO: 23, SEQ ID NO: 25, SEQ ID NO: 27, SEQ ID NO: 29, SEQ ID NO: 31, SEQ ID NO: 33, SEQ ID NO: 35, SEQ ID NO: 37, SEQ ID NO: 39, SEQ ID NO: 41 SEQ ID NO: 43 or SEQ ID NO: 45. In another advantageously embodiment, the nucleic acid molecule does not encode a polypeptide of the sequence as depicted in SEQ ID NO: 4, SEQ ID NO: 6, SEQ ID NO: 8, SEQ ID NO: 10, SEQ ID NO: 12, SEQ ID NO: 14, SEQ ID NO: 16, SEQ ID NO: 18, SEQ ID NO: 20, SEQ ID NO: 22, SEQ ID NO: 24, SEQ ID NO: 26, SEQ ID NO: 28, SEQ ID NO: 30, SEQ ID NO: 32, SEQ ID NO: 34, SEQ ID NO: 36, SEQ ID NO: 38, SEQ ID NO: 40, SEQ ID NO: 42, SEQ ID NO: 44 or SEQ ID NO: 46.

[0147] Unless otherwise specified, the terms “polynucleotides”, “nucleic acid” and “nucleic acid molecule” are interchangeably in the present context. Unless otherwise specified, the terms “peptide”, “polypeptide” and “protein” are interchangeably in the present context. The term “sequence” may relate to polynucleotides, nucleic acids, nucleic acid molecules, peptides, polypeptides and proteins, depending on the context in which the term “sequence” is used. The terms “gene(s)”, “polynucleotide”, “nucleic acid sequence”, “nucleotide sequence”, or “nucleic acid molecule(s)” as used herein refers to a polymeric form of nucleotides of any length, either ribonucleotides or deoxyribonucleotides. The terms refer only to the primary structure of the molecule.

[0148] Thus, the terms “gene(s)”, “polynucleotide”, “nucleic acid sequence”, “nucleotide sequence”, or “nucleic acid molecule(s)” as used herein include double- and single-stranded DNA and RNA. They also include known types of modifications, for example, methylation, “caps”, substitutions of one or more of the naturally occurring nucleotides with an analog. Preferably, the DNA or RNA sequence of the invention comprises a coding sequence encoding the herein defined polypeptide.

[0149] A “coding sequence” is a nucleotide sequence, which is transcribed into mRNA and/or translated into a polypeptide when placed under the control of appropriate regulatory sequences. The boundaries of the coding sequence are determined by a translation start codon at the 5′-terminus and a translation stop codon at the 3′-terminus. A coding sequence can include, but is not limited to mRNA, cDNA, recombinant nucleotide sequences or genomic DNA, while introns may be present as well under certain circumstances.

[0150] Nucleic acid molecules with the sequence as depicted in SEQ ID NO: 1, SEQ ID NO: 3, SEQ ID NO: 5, SEQ ID NO: 7, SEQ ID NO: 9, SEQ ID NO: 11, SEQ ID NO: 13, SEQ ID NO: 15, SEQ ID NO: 17, SEQ ID NO: 19, SEQ ID NO: 21, SEQ ID NO: 23, SEQ ID NO: 25, SEQ ID NO: 27, SEQ ID NO: 29, SEQ ID NO: 31, SEQ ID NO: 33, SEQ ID NO: 35, SEQ ID NO: 37, SEQ ID NO: 39, SEQ ID NO: 41 SEQ ID NO: 43 or SEQ ID NO: 45, nucleic acid molecules which are derived from the amino acid sequences as depicted in SEQ ID NO: 2, SEQ ID NO: 4, SEQ ID NO: 6, SEQ ID NO: 8, SEQ ID NO: 10, SEQ ID NO: 12, SEQ ID NO: 14, SEQ ID NO: 16, SEQ ID NO: 18, SEQ ID NO: 20, SEQ ID NO: 22, SEQ ID NO: 24, SEQ ID NO: 26, SEQ ID NO: 28, SEQ ID NO: 30, SEQ ID NO: 32, SEQ ID NO: 34, SEQ ID NO: 36, SEQ ID NO: 38, SEQ ID NO: 40, SEQ ID NO: 42, SEQ ID NO: 44 or SEQ ID NO: 46 or from polypeptides comprising the consensus sequence as depicted in SEQ ID NO: 47, SEQ ID NO: 48, SEQ ID NO: 49, SEQ ID NO: 50, SEQ ID NO: 51, SEQ ID NO: 52, SEQ ID NO: 397, SEQ ID NO: 398, SEQ ID NO: 399 and/or SEQ ID NO: 400, or their derivatives or homologues encoding polypeptides with the enzymatic or biological activity of a protein as depicted in SEQ ID NO: 2, SEQ ID NO: 4, SEQ ID NO: 6, SEQ ID NO: 8, SEQ ID NO: 10, SEQ ID NO: 12, SEQ ID NO: 14, SEQ ID NO: 16, SEQ ID NO: 18, SEQ ID NO: 20, SEQ ID NO: 22, SEQ ID NO: 24, SEQ ID NO: 26, SEQ ID NO: 28, SEQ ID NO: 30, SEQ ID NO: 32, SEQ ID NO: 34, SEQ ID NO: 36, SEQ ID NO: 38, SEQ ID NO: 40, SEQ ID NO: 42, SEQ ID NO: 44 or SEQ ID NO: 46 and/or conferring a fine chemical increase after increasing its expression or activity are advantageously increased in the process according to the invention.

[0151] In one embodiment, said sequences are cloned into nucleic acid constructs, either individually or in combination. These nucleic acid constructs enable an optimal synthesis of the fine chemical produced in the process according to the invention.

[0152] Nucleic acid molecules, which are advantageous for the process according to the invention and which encode polypeptides with the biological activity of the protein of the invention can be determined from generally accessible databases.

[0153] Those, which must be mentioned, in particular in this context are general gene databases such as the EMBL database (Stoesser G. et al., Nucleic Acids Res 2001, Vol. 29, 17-21), the GenBank database (Benson D. A. et al., Nucleic Acids Res 2000, Vol. 28, 15-18), or the PIR database (Barker W. C. et al., Nucleic Acids Res. 1999, Vol. 27, 39-43). It is furthermore possible to use organism-specific gene databases for determining advantageous sequences, in the case of yeast for example advantageously the SGD database (Cherry J. M. et al., Nucleic Acids Res. 1998, Vol. 26, 73-80) or the MIPS database (Mewes H. W. et al., Nucleic Acids Res. 1999, Vol. 27, 44-48), in the case of E. coli the GenProtEC database (http://web.bham.ac.uk/bcm4ght6/res.html), and in the case of Arabidopsis the TAIR-database (Huala, E. et al., Nucleic Acids Res. 2001 Vol. 29(1), 102-5) or the MIPS database.

[0154] The nucleic acid molecules used in the process according to the invention take the form of isolated nucleic acid sequences, which encode polypeptides having the biological activity represented by a protein as depicted in SEQ ID NO: 2, 4, 6, 8, 10, 12, 14, 16, 18, 20, 22, 24, 26, 28, 30, 32, 34, 36, 38, 40, 42, 44, 46, 56, 58, 60, 62, 64, 66, 68, 70, 72, 74, 76, 78, 80, 82, 84, 86, 88, 90, 92, 94, 96, 98, 100, 102, 104, 106, 108, 110, 112, 114, 116, 118, 120, 122, 124, 126, 128, 130, 132, 134, 136, 138, 140, 142, 144, 146, 148, 150, 152, 154, 156, 158, 160, 162, 164, 166, 168, 170, 172, 174, 176, 178, 180, 182, 184, 186, 188, 190, 192, 194, 196, 198, 200, 202, 204, 206, 208, 210, 212, 214, 216, 218, 220, 222, 224, 226, 228, 230, 232, 234, 236, 238, 240, 242, 244, 246, 248, 250, 252, 254, 256, 258, 260, 262, 264, 266, 268, 270, 272, 274, 276, 278, 280, 282, 284, 286, 288, 290, 292, 294, 296, 298, 300, 302, 304, 306, 308, 310, 312, 314, 316, 318, 320, 322, 324, 326, 328, 330, 332, 334, 336, 338, 340, 342, 344, 346, 348, 350, 352, 354, 356, 358, 360, 362, 364, 366, 368, 370, 372, 374, 376, 378, 380, 382, 384, 386, 388, 390, 392 or 394 and conferring the fine chemical increase.

[0155] The nucleic acid sequence(s) used in the process for the production of the fine chemical in transgenic organisms originate advantageously from an eukaryote but may also originate from a prokaryote or an archebacterium, thus it can derived from e.g. a microorganism, an animal or a plant.

[0156] For the purposes of the invention, as a rule the plural is intended to encompass the singular and vice versa.

[0157] In order to improve the introduction of the nucleic acid sequences and the expression of the sequences in the transgenic organisms, which are used in the process, the nucleic acid sequences are incorporated into a nucleic acid construct and/or a vector. In addition to the herein described sequences which are used in the process according to the invention, further nucleic acid sequences, advantageously of biosynthesis genes of amino acids, carbohydrates, lipids, fatty acids, vitamins etc. produced in the process according to the invention, may additionally be present in the nucleic acid construct or in the vector and may be introduced into the organism together. However, these additional sequences may also be introduced into the organisms via other, separate nucleic acid constructs or vectors.

[0158] Using the herein mentioned cloning vectors and transformation methods such as those which are published and cited in: Plant Molecular Biology and Biotechnology (CRC Press, Boca Raton, Fla.), chapter 6/7, pp. 71-119 (1993); F. F. White, Vectors for Gene Transfer in Higher Plants; in: Transgenic Plants, vol. 1, Engineering and Utilization, Ed.: Kung and R. Wu, Academic Press, 1993, 15-38; B. Jenes et al., Techniques for Gene Transfer, in: Transgenic Plants, vol. 1, Engineering and Utilization, Ed.: Kung and R. Wu, Academic Press (1993), 128-143; Potrykus, Annu. Rev. Plant. Physiol. Plant Molec. Biol. 42 (1991), 205-225)) and further cited below, the nucleic acids may be used for the recombinant modification of a wide range of organisms, in particular prokaryotic or eukaryotic microorganisms or plants, so that they become a better and more efficient producer of the fine chemical produced in the process according to the invention. This improved production, or production efficiency, of the fine chemical or products derived there from, such as modified proteins, can be brought about by a direct effect of the manipulation or by an indirect effect of this manipulation.

[0159] In one embodiment, the nucleic acid molecule according to the invention originates from a plant, such as a plant selected from the families Aceraceae, Anacardiaceae, Apiaceae, Asteraceae, Brassicaceae, Cactaceae, Cucurbitaceae, Euphorbiaceae, Fabaceae, Malvaceae, Nymphaeaceae, Papaveraceae, Rosaceae, Salicaceae, Solanaceae, Arecaceae, Bromeliaceae, Cyperaceae, lridaceae, Liliaceae, Orchidaceae, Gentianaceae, Labiaceae, Magnoliaceae, Ranunculaceae, Carifolaceae, Rubiaceae, Scrophulariaceae, Caryophyllaceae, Ericaceae, Polygonaceae, Violaceae, Juncaceae or Poaceae and preferably from a plant selected from the group of the families Apiaceae, Asteraceae, Brassicaceae, Cucurbitaceae, Fabaceae, Papaveraceae, Rosaceae, Solanaceae, Liliaceae or Poaceae. Preferred are crop plants and in particular plants mentioned herein above as host plants such as the families and genera mentioned above for example preferred the species Anacardium occidentale, Calendula officinalis, Carthamus tinctorius, Cichorium intybus, Cynara scolymus, Helianthus annus, Tagetes lucida, Tagetes erecta, Tagetes tenuifolia; Daucus carota; Corylus avellana, Corylus colurna, Borago officinalis; Brassica napus, Brassica rapa ssp., Sinapis arvensis, Brassica juncea, Brassica juncea var. juncea, Brassica juncea var. crispifolia, Brassica juncea var. foliosa, Brassica nigra, Brassica sinapioides, Melanosinapis communis, Brassica oleracea, Arabidopsis thaliana, Anana comosus, Ananas ananas, Bromelia comosa, Carica papaya, Cannabis sative, Ipomoea batatus, Ipomoea pandurata, Convolvulus batatas, Convolvulus tiliaceus, Ipomoea fastigiata, Ipomoea tiliacea, Ipomoea triloba, Convolvulus panduratus, Beta vulgaris, Beta vulgaris var. altissima, Beta vulgaris var. vulgaris, Beta maritima, Beta vulgaris var. perennis, Beta vulgaris var. conditiva, Beta vulgaris var. esculenta, Cucurbita maxima, Cucurbita mixta, Cucurbita pepo, Cucurbita moschata, Olea europaea, Manihot utilissima, Janipha manihot, Jatropha manihot, Manihot aipil, Manihot dulcis, Manihot manihot, Manihot melanobasis, Manihot esculenta, Ricinus communis, Pisum sativum, Pisum arvense, Pisum humile, Medicago sativa, Medicago falcata, Medicago varia, Glycine max Dolichos soja, Glycine gracilis, Glycine hispida, Phaseolus max, Soja hispida, Soja max, Cocos nucifera, Pelargonium grossularioides, Oleum cocoas, Laurus nobilis, Persea americana, Arachis hypogaea, Linum usitatissimum, Linum humile, Linum austriacum, Linum bienne, Linum angustifolium, Linum catharticum, Linum flavum, Linum grandiflorum, Adenolinum grandiflorum, Linum lewisii, Linum narbonense, Linum perenne, Linum perenne var. lewisii, Linum pratense, Linum trigynum, Punica granatum, Gossypium hirsutum, Gossypium arboreum, Gossypium barbadense, Gossypium herbaceum, Gossypium thurberi, Musa nana, Musa acuminata, Musa paradisiaca, Musa spp., Elaeis guineensis, Papaver orientale, Papaver rhoeas, Papaver dubium, Sesamum indicum, Piper aduncum, Piper amalago, Piper angustifolium, Piper auritum, Piper betel, Piper cubeba, Piper longum, Piper nigrum, Piper retrofractum, Artanthe adunca, Artanthe elongata, Peperomia elongata, Piper elongatum, Steffensia elongata, Hordeum vulgare, Hordeum jubatum, Hordeum murinum, Hordeum secalinum, Hordeum distichon, Hordeum aegiceras, Hordeum hexastichon, Hordeum hexastichum, Hordeum irregulare, Hordeum sativum, Hordeum secalinum, Avena sativa, Avena fatua, Avena byzantina, Avena fatua var. sativa, Avena hybrida, Sorghum bicolor, Sorghum halepense, Sorghum saccharatum, Sorghum vulgare, Andropogon drummondii, Holcus bicolor, Holcus sorghum, Sorghum aethiopicum, Sorghum arundinaceum, Sorghum caffrorum, Sorghum cernuum, Sorghum dochna, Sorghum drummondii, Sorghum durra, Sorghum guineense, Sorghum lanceolatum, Sorghum nervosum, Sorghum saccharatum, Sorghum subglabrescens, Sorghum verticilliflorum, Sorghum vulgare, Holcus halepensis, Sorghum miliaceum millet, Panicum militaceum, Zea mays, Triticum aestivum, Triticum durum, Triticum turgidum, Triticum hybernum, Triticum macha, Triticum sativum or Triticum vulgare, Cofea spp., Coffea arabica, Coffea canephora, Coffea liberica, Capsicum annuum, Capsicum annuum var. glabriusculum, Capsicum frutescens, Capsicum annuum, Nicotiana tabacum, Solanum tuberosum, Solanum melongena, Lycopersicon esculentum, Lycopersicon lycopersicum, Lycopersicon pyriforme, Solanum integrifolium, Solanum lycopersicum Theobroma cacao or Camellia sinensis.

[0160] In one embodiment, the nucleic acid molecule sequence originates advantageously from a microorganism as mentioned above under host organism such as a fungus for example the genera Aspergillus, Penicillium or Claviceps or from yeasts such as the genera Pichia, Torulopsis, Hansenula, Schizosaccharomyces, Candida, Rhodotorula or Saccharomyces, very especially advantageously from the yeast of the family Saccharomycetaceae, such as the advantageous genus Saccharomyces and the very advantageous genus and species Saccharomyces cerevisiae for the production of the fine chemical in microorganims.

[0161] The skilled worker knows other suitable sources for the production of fine chemicals, which present also useful nucleic acid molecule sources. They include in general all prokaryotic or eukaryotic cells, preferably unicellular microorganisms, such as fungi like the genus Claviceps or Aspergillus or gram-positive bacteria such as the genera Bacillus, Corynebacterium, Micrococcus, Brevibacterium, Rhodococcus, Nocardia, Caseobacter or Arthrobacter or gram-negative bacteria such as the genera Escherichia, Flavobacterium or Salmonella, or yeasts such as the genera Rhodotorula, Hansenula or Candida.

[0162] Production strains which are especially advantageously selected in the process according to the invention are microorganisms selected from the group of the families Actinomycetaceae, Bacillaceae, Brevibacteriaceae, Corynebacteriaceae, Enterobacteriacae, Gordoniaceae, Micrococcaceae, Mycobacteriaceae, Nocardiaceae, Pseudomonaceae, Rhizobiaceae, Streptomycetaceae, Chaetomiaceae, Choanephoraceae, Cryptococcaceae, Cunninghamellaceae, Demetiaceae, Moniliaceae, Mortierellaceae, Mucoraceae, Pythiaceae, Saccharomycetaceae, Saprolegniaceae, Schizosaccharomycetaceae, Sodariaceae, Sporobolomycetaceae, Tuberculariaceae, Adelotheciaceae, Dinophyceae, Ditrichaceae and Prasinophyceaeor of the genera and species consisting of Hansenula anomala, Candida utilis, Claviceps purpurea, Bacillus circulans, Bacillus subtilis, Bacillus sp., Brevibacterium albidum, Brevibacterium album, Brevibacterium cerinum, Brevibacterium flavum, Brevibacterium glutamigenes, Brevibacterium iodinum, Brevibacterium ketoglutamicum, Brevibacterium lactofermentum, Brevibacterium linens, Brevibacterium roseum, Brevibacterium saccharolyticum, Brevibacterium sp., Corynebacterium acetoacidophilum, Corynebacterium acetoglutamicum, Corynebacterium ammoniagenes, Corynebacterium glutamicum (=Micrococcus glutamicum), Corynebacterium melassecola, Corynebacterium sp. or Escherichia coli, specifically Escherichia coli K12 and its described strains.

[0163] However, it is also possible to use artificial sequences, which differ in one or more bases (=nucleotides) from the nucleic acid sequences found in organisms, or in one or more amino acid molecules from polypeptide sequences found in organisms, in particular from the polypeptide sequences as depicted in SEQ ID NO: 2, 4, 6, 8, 10, 12, 14, 16, 18, 20, 22, 24, 26, 28, 30, 32, 34, 36, 38, 40, 42, 44, 46, 56, 58, 60, 62, 64, 66, 68, 70, 72, 74, 76, 78, 80, 82, 84, 86, 88, 90, 92, 94, 96, 98, 100, 102, 104, 106, 108, 110, 112, 114, 116, 118, 120, 122, 124, 126, 128, 130, 132, 134, 136, 138, 140, 142, 144, 146, 148, 150, 152, 154, 156, 158, 160, 162, 164, 166, 168, 170, 172, 174, 176, 178, 180, 182, 184, 186, 188, 190, 192, 194, 196, 198, 200, 202, 204, 206, 208, 210, 212, 214, 216, 218, 220, 222, 224, 226, 228, 230, 232, 234, 236, 238, 240, 242, 244, 246, 248, 250, 252, 254, 256, 258, 260, 262, 264, 266, 268, 270, 272, 274, 276, 278, 280, 282, 284, 286, 288, 290, 292, 294, 296, 298, 300, 302, 304, 306, 308, 310, 312, 314, 316, 318, 320, 322, 324, 326, 328, 330, 332, 334, 336, 338, 340, 342, 344, 346, 348, 350, 352, 354, 356, 358, 360, 362, 364, 366, 368, 370, 372, 374, 376, 378, 380, 382, 384, 386, 388, 390, 392 or 394 or the functional homologues thereof as described herein, preferably conferring above-mentioned biological activity, i.e. conferring the fine chemical increase after increasing its activity, e.g. having the biological activity represented by a protein as depicted in SEQ ID NO: 2, 4, 6, 8, 10, 12, 14, 16, 18, 20, 22, 24, 26, 28, 30, 32, 34, 36, 38, 40, 42, 44, 46, 56, 58, 60, 62, 64, 66, 68, 70, 72, 74, 76, 78, 80, 82, 84, 86, 88, 90, 92, 94, 96, 98, 100, 102, 104, 106, 108, 110, 112, 114, 116, 118, 120, 122, 124, 126, 128, 130, 132, 134, 136, 138, 140, 142, 144, 146, 148, 150, 152, 154, 156, 158, 160, 162, 164, 166, 168, 170, 172, 174, 176, 178, 180, 182, 184, 186, 188, 190, 192, 194, 196, 198, 200, 202, 204, 206, 208, 210, 212, 214, 216, 218, 220, 222, 224, 226, 228, 230, 232, 234, 236, 238, 240, 242, 244, 246, 248, 250, 252, 254, 256, 258, 260, 262, 264, 266, 268, 270, 272, 274, 276, 278, 280, 282, 284, 286, 288, 290, 292, 294, 296, 298, 300, 302, 304, 306, 308, 310, 312, 314, 316, 318, 320, 322, 324, 326, 328, 330, 332, 334, 336, 338, 340, 342, 344, 346, 348, 350, 352, 354, 356, 358, 360, 362, 364, 366, 368, 370, 372, 374, 376, 378, 380, 382, 384, 386, 388, 390, 392 or 394.

[0164] In the process according to the invention nucleic acid sequences can be used, which, if appropriate, contain synthetic, non-natural or modified nucleotide bases, which can be incorporated into DNA or RNA. Said synthetic, non-natural or modified bases can for example increase the stability of the nucleic acid molecule outside or inside a cell. The nucleic acid molecules of the invention can contain the same modifications as aforementioned.

[0165] As used in the present context the term “nucleic acid molecule” may also encompass the untranslated sequence located at the 3′ and at the 5′ end of the coding gene region, for example at least 500, preferably 200, especially preferably 100, nucleotides of the sequence upstream of the 5′ end of the coding region and at least 100, preferably 50, especially preferably 20, nucleotides of the sequence downstream of the 3′ end of the coding gene region. It is often advantageous only to choose the coding region for cloning and expression purposes.

[0166] Preferably, the nucleic acid molecule used in the process according to the invention or the nucleic acid molecule of the invention is an isolated nucleic acid molecule.

[0167] An “isolated” polynucleotide or nucleic acid molecule is separated from other polynucleotides or nucleic acid molecules, which are present in the natural source of the nucleic acid molecule. An isolated nucleic acid molecule may be a chromosomal fragment of several kb, or preferably, a molecule only comprising the coding region of the gene. Accordingly, an isolated nucleic acid molecule of the invention may comprise chromosomal regions, which are adjacent 5′ and 3′ or further adjacent chromosomal regions, but preferably comprises no such sequences which naturally flank the nucleic acid molecule sequence in the genomic or chromosomal context in the organism from which the nucleic acid molecule originates (for example sequences which are adjacent to the regions encoding the 5′- and 3′-UTRs of the nucleic acid molecule). In various embodiments, the isolated nucleic acid molecule used in the process according to the invention may, for example comprise less than approximately 5 kb, 4 kb, 3 kb, 2 kb, 1 kb, 0.5 kb or 0.1 kb nucleotide sequences which naturally flank the nucleic acid molecule in the genomic DNA of the cell from which the nucleic acid molecule originates.

[0168] The nucleic acid molecules used in the process, for example the polynucleotides of the invention or of a part thereof can be isolated using molecular-biological standard techniques and the sequence information provided herein. Also, for example a homologous sequence or homologous, conserved sequence regions at the DNA or amino acid level can be identified with the aid of comparison algorithms. The former can be used as hybridization probes under standard hybridization techniques (for example those described in Sambrook et al., Molecular Cloning: A Laboratory Manual. 2nd Ed., Cold Spring Harbor Laboratory, Cold Spring Harbor Laboratory Press, Cold Spring Harbor, N.Y., 1989) for isolating further nucleic acid sequences useful in this process.

[0169] A nucleic acid molecule encompassing a complete sequence of the nucleic acid molecules used in the process, for example the polynucleotide of the invention, or a part thereof may additionally be isolated by polymerase chain reaction, oligonucleotide primers based on this sequence or on parts thereof being used. For example, a nucleic acid molecule comprising the complete sequence or part thereof can be isolated by polymerase chain reaction using oligonucleotide primers which have been generated on the basis of this sequence for example, mRNA can be isolated from cells (for example by means of the guanidinium thiocyanate extraction method of Chirgwin et al. (1979) Biochemistry 18:5294-5299) and cDNA can be generated by means of reverse transcriptase (for example Moloney MLV reverse transcriptase, available from Gibco/BRL, Bethesda, Md., or AMV reverse transcriptase, obtainable from Seikagaku America, Inc., St. Petersburg, Fla.).

[0170] Synthetic oligonucleotide primers for the amplification, e.g. as shown in SEQ ID NO: 53, SEQ ID NO: 54, SEQ ID NO: 395 or SEQ ID NO: 396, by means of polymerase chain reaction can be generated on the basis of a sequence shown herein, for example the sequence as depicted in SEQ ID NO: 1, 3, 5, 7, 9, 11, 13, 15, 17, 19, 21, 23, 25, 27, 29, 31, 33, 35, 37, 39, 41, 43, 45, 55, 57, 59, 61, 63, 65, 67, 69, 71, 73, 75, 77, 79, 81, 83, 85, 87, 89, 91, 93, 95, 97, 99, 101, 103, 105, 107, 109, 111, 113, 115, 117, 119, 121, 123, 125, 127, 129, 131, 133, 135, 137, 139, 141, 143, 145, 147, 149, 151, 153, 155, 157, 159, 161, 163, 165, 167, 169, 171, 173, 175, 177, 179, 181, 183, 185, 187, 189, 191, 193, 195, 197, 199, 201, 203, 205, 207, 209, 211, 213, 215, 217, 219, 221, 223, 225, 227, 229, 231, 233, 235, 237, 239, 241, 243, 245, 247, 249, 251, 253, 255, 257, 259, 261, 263, 265, 267, 269, 271, 273, 275, 277, 279, 281, 283, 285, 287, 289, 291, 293, 295, 297, 299, 301, 303, 305, 307, 309, 311, 313, 315, 317, 319, 321, 323, 325, 327, 329, 331, 333, 335, 337, 339, 341, 343, 345, 347, 349, 351, 353, 355, 357, 359, 361, 363, 365, 367, 369, 371, 373, 375, 377, 379, 381, 383, 385, 387, 389, 391 or 393.

[0171] Moreover, it is possible to identify conserved regions from various organisms by carrying out protein sequence alignments with the polypeptide used in the process of the invention, in particular with sequences of the polypeptide of the invention, from which conserved regions, and in turn, degenerate primers can be derived. Conserved regions are those, which show a very little variation in the amino acid in one particular position of several homologs from different origin. The consensus sequences as depicted in SEQ ID NO: 47, SEQ ID NO: 48, SEQ ID NO: 49, SEQ ID NO: 50, SEQ ID NO: 51, SEQ ID NO: 52, SEQ ID NO: 397, SEQ ID NO: 398, SEQ ID NO: 399 and/or SEQ ID NO: 400 are derived from said alignments.

[0172] Degenerated primers can then be utilized by PCR for the amplification of fragments of novel proteins having above-mentioned activity, e.g. conferring the increase of the fine chemical after increasing the expression or activity or having the biological activity represented by a protein as depicted in SEQ ID NO: 2, 4, 6, 8, 10, 12, 14, 16, 18, 20, 22, 24, 26, 28, 30, 32, 34, 36, 38, 40, 42, 44, 46, 56, 58, 60, 62, 64, 66, 68, 70, 72, 74, 76, 78, 80, 82, 84, 86, 88, 90, 92, 94, 96, 98, 100, 102, 104, 106, 108, 110, 112, 114, 116, 118, 120, 122, 124, 126, 128, 130, 132, 134, 136, 138, 140, 142, 144, 146, 148, 150, 152, 154, 156, 158, 160, 162, 164, 166, 168, 170, 172, 174, 176, 178, 180, 182, 184, 186, 188, 190, 192, 194, 196, 198, 200, 202, 204, 206, 208, 210, 212, 214, 216, 218, 220, 222, 224, 226, 228, 230, 232, 234, 236, 238, 240, 242, 244, 246, 248, 250, 252, 254, 256, 258, 260, 262, 264, 266, 268, 270, 272, 274, 276, 278, 280, 282, 284, 286, 288, 290, 292, 294, 296, 298, 300, 302, 304, 306, 308, 310, 312, 314, 316, 318, 320, 322, 324, 326, 328, 330, 332, 334, 336, 338, 340, 342, 344, 346, 348, 350, 352, 354, 356, 358, 360, 362, 364, 366, 368, 370, 372, 374, 376, 378, 380, 382, 384, 386, 388, 390, 392 or 394 or further functional homologs of the polypeptide of the invention from other organisms.

[0173] These fragments can then be utilized as hybridization probe for isolating the complete gene sequence. As an alternative, the missing 5′ and 3′ sequences can be isolated by means of RACE-PCR (rapid amplification of cDNA ends). A nucleic acid molecule according to the invention can be amplified using cDNA or, as an alternative, genomic DNA as template and suitable oligonucleotide primers, following standard PCR amplification techniques. The nucleic acid molecule amplified thus can be cloned into a suitable vector and characterized by means of DNA sequence analysis. Oligonucleotides, which correspond to one of the nucleic acid molecules used in the process can be generated by standard synthesis methods, for example using an automatic DNA synthesizer.

[0174] Nucleic acid molecules which are advantageously for the process according to the invention can be isolated based on their homology to the nucleic acid molecules disclosed herein using the sequences or part thereof as hybridization probe and following standard hybridization techniques under stringent hybridization conditions. In this context, it is possible to use, for example, isolated nucleic acid molecules of at least 15, 20, 25, 30, 35, 40, 50, 60 or more nucleotides, preferably of at least 15, 20 or 25 nucleotides in length which hybridize under stringent conditions with the above-described nucleic acid molecules, in particular with those which encompass a nucleotide sequence of the nucleic acid molecule used in the process of the invention or encoding a protein used in the invention or of the nucleic acid molecule of the invention. Nucleic acid molecules with 30, 50, 100, 250 or more nucleotides may also be used.

[0175] The term “homology” means that the respective nucleic acid molecules or encoded proteins are functionally and/or structurally equivalent. The nucleic acid molecules that are homologous to the nucleic acid molecules described above and that are derivatives of said nucleic acid molecules are, for example, variations of said nucleic acid molecules which represent modifications having the same biological function, in particular encoding proteins with the same or substantially the same biological function. They may be naturally occurring variations, such as sequences from other plant varieties or species, or mutations. These mutations may occur naturally or may be obtained by mutagenesis techniques. The allelic variations may be naturally occurring allelic variants as well as synthetically produced or genetically engineered variants. Structurally equivalents can, for example, be identified by testing the binding of said polypeptide to antibodies or computer based predictions. Structurally equivalent have the similar immunological characteristic, e.g. comprise similar epitopes.

[0176] By “hybridizing” it is meant that such nucleic acid molecules hybridize under conventional hybridization conditions, preferably under stringent conditions such as described by, e.g., Sambrook (Molecular Cloning; A Laboratory Manual, 2nd Edition, Cold Spring Harbor Laboratory Press, Cold Spring Harbor, N.Y. (1989)) or in Current Protocols in Molecular Biology, John Wiley & Sons, N.Y. (1989), 6.3.1-6.3.6.

[0177] According to the invention, DNA as well as RNA molecules of the nucleic acid of the invention can be used as probes. Further, as template for the identification of functional homologues Northern blot assays as well as Southern blot assays can be performed. The Northern blot assay advantageously provides further informations about the expressed gene product: e.g. expression pattern, occurance of processing steps, like splicing and capping, etc. The Southern blot assay provides additional information about the chromosomal localization and organization of the gene encoding the nucleic acid molecule of the invention.

[0178] A preferred, nonlimiting example of stringent hydridization conditions are hybridizations in 6× sodium chloride/sodium citrate (=SSC) at approximately 45° C., followed by one or more wash steps in 0.2×SSC, 0.1% SDS at 50 to 65° C., for example at 50° C., 55° C. or 60° C. The skilled worker knows that these hybridization conditions differ as a function of the type of the nucleic acid and, for example when organic solvents are present, with regard to the temperature and concentration of the buffer. The temperature under “standard hybridization conditions” differs for example as a function of the type of the nucleic acid between 42° C. and 58° C., preferably between 45° C. and 50° C. in an aqueous buffer with a concentration of 0.1×0.5×, 1×, 2×, 3×, 4× or 5×SSC (pH 7.2). If organic solvent(s) is/are present in the abovementioned buffer, for example 50% formamide, the temperature under standard conditions is approximately 40° C., 42° C. or 45° C. The hybridization conditions for DNA:DNA hybrids are preferably for example 0.1×SSC and 20° C., 25° C., 30° C., 35° C., 40° C. or 45° C., preferably between 30° C. and 45° C. The hybridization conditions for DNA:RNA hybrids are preferably for example 0.1×SSC and 30° C., 35° C., 40° C., 45° C., 50° C. or 55° C., preferably between 45° C. and 55° C. The abovementioned hybridization temperatures are determined for example for a nucleic acid approximately 100 bp (=base pairs) in length and a G+C content of 50% in the absence of formamide. The skilled worker knows to determine the hybridization conditions required with the aid of textbooks, for example the ones mentioned above, or from the following textbooks: Sambrook et al., “Molecular Cloning”, Cold Spring Harbor Laboratory, 1989; Hames and Higgins (Ed.) 1985, “Nucleic Acids Hybridization: A Practical Approach”, IRL Press at Oxford University Press, Oxford; Brown (Ed.) 1991, “Essential Molecular Biology: A Practical Approach”, IRL Press at Oxford University Press, Oxford.

[0179] A further example of one such stringent hybridization condition is hybridization at 4×SSC at 65° C., followed by a washing in 0.1×SSC at 65° C. for one hour. Alternatively, an exemplary stringent hybridization condition is in 50% formamide, 4×SSC at 42° C. Further, the conditions during the wash step can be selected from the range of conditions delimited by low-stringency conditions (approximately 2×SSC at 50° C.) and high-stringency conditions (approximately 0.2×SSC at 50° C., preferably at 65° C.) (20×SSC: 0.3M sodium citrate, 3M NaCl, pH 7.0). In addition, the temperature during the wash step can be raised from low-stringency conditions at room temperature, approximately 22° C., to higher-stringency conditions at approximately 65° C. Both of the parameters salt concentration and temperature can be varied simultaneously, or else one of the two parameters can be kept constant while only the other is varied. Denaturants, for example formamide or SDS, may also be employed during the hybridization. In the presence of 50% formamide, hybridization is preferably effected at 42° C. Relevant factors like i) length of treatment, ii) salt conditions, iii) detergent conditions, iv) competitor DNAs, v) temperature and vi) probe selection can be combined case by case so that not all possibilities can be mentioned herein.

[0180] Thus, in a preferred embodiment, Northern blots are prehybridized with Rothi-Hybri-Quick buffer (Roth, Karlsruhe) at 68° C. for 2 h. Hybridzation with radioactive labelled probe is done overnight at 68° C. Subsequent washing steps are performed at 68° C. with 1×SSC.

[0181] For Southern blot assays the membrane is prehybridized with Rothi-Hybri-Quick buffer (Roth, Karlsruhe) at 68° C. for 2 h. The hybridzation with radioactive labelled probe is conducted over night at 68° C. Subsequently the hybridization buffer is discarded and the filter shortly washed using 2×SSC; 0.1% SDS. After discarding the washing buffer new 2×SSC; 0.1% SDS buffer is added and incubated at 68° C. for 15 minutes. This washing step is performed twice followed by an additional washing step using 1×SSC; 0.1% SDS at 68° C. for 10 min.

[0182] Some further examples of conditions for DNA hybridization (Southem blot assays) and wash step are shown hereinbelow:
[0183] (1) Hybridization conditions can be selected, for example, from the following conditions:
[0184] a) 4×SSC at 65° C.,
[0185] b) 6×SSC at 45° C.,
[0186] c) 6×SSC, 100 mg/ml denatured fragmented fish sperm DNA at 68° C.,
[0187] d) 6×SSC, 0.5% SDS, 100 mg/ml denatured salmon sperm DNA at 68° C.,
[0188] e) 6×SSC, 0.5% SDS, 100 mg/ml denatured fragmented salmon sperm DNA, 50% formamide at 42° C.,
[0189] f) 50% formamide, 4×SSC at 42° C.,
[0190] g) 50% (vol/vol) formamide, 0.1% bovine serum albumin, 0.1% Ficoll, 0.1% polyvinylpyrrolidone, 50 mM sodium phosphate buffer pH 6.5, 750 mM NaCl, 75 mM sodium citrate at 42° C.,
[0191] h) 2× or 4×SSC at 50° C. (low-stringency condition), or
[0192] i) 30 to 40% formamide, 2× or 4×SSC at 42° C. (low-stringency condition).
[0193] (2) Wash steps can be selected, for example, from the following conditions:
[0194] a) 0.015 M NaCl/0.0015 M sodium citrate/0.1% SDS at 50° C.
[0195] b) 0.1×SSC at 65° C.
[0196] c) 0.1×SSC, 0.5% SDS at 68° C.
[0197] d) 0.1×SSC, 0.5% SDS, 50% formamide at 42° C.
[0198] e) 0.2×SSC, 0.1% SDS at 42° C.
[0199] f) 2×SSC at 65° C. (low-stringency condition).

[0200] Polypeptides having above-mentioned biological activity, i.e. conferring the fine chemical increase, derived from other organisms, can be encoded by other DNA sequences which hybridize to the sequences shown in SEQ ID NO: 1, 3, 5, 7, 9, 11, 13, 15, 17, 19, 21, 23, 25, 27, 29, 31, 33, 35, 37, 39, 41, 43, 45, 55, 57, 59, 61, 63, 65, 67, 69, 71, 73, 75, 77, 79, 81, 83, 85, 87, 89, 91, 93, 95, 97, 99, 101, 103, 105, 107, 109, 111, 113, 115, 117, 119, 121, 123, 125, 127, 129, 131, 133, 135, 137, 139, 141, 143, 145, 147, 149, 151, 153, 155, 157, 159, 161, 163, 165, 167, 169, 171, 173, 175, 177, 179, 181, 183, 185, 187, 189, 191, 193, 195, 197, 199, 201, 203, 205, 207, 209, 211, 213, 215, 217, 219, 221, 223, 225, 227, 229, 231, 233, 235, 237, 239, 241, 243, 245, 247, 249, 251, 253, 255, 257, 259, 261, 263, 265, 267, 269, 271, 273, 275, 277, 279, 281, 283, 285, 287, 289, 291, 293, 295, 297, 299, 301, 303, 305, 307, 309, 311, 313, 315, 317, 319, 321, 323, 325, 327, 329, 331, 333, 335, 337, 339, 341, 343, 345, 347, 349, 351, 353, 355, 357, 359, 361, 363, 365, 367, 369, 371, 373, 375, 377, 379, 381, 383, 385, 387, 389, 391 or 393 under relaxed hybridization conditions and which code on expression for peptides having the fine chemical increasing activity.

[0201] Further, some applications have to be performed at low stringency hybridisation conditions, without any consequences for the specificity of the hybridisation. For example, a Southern blot analysis of total DNA could be probed with a nucleic acid molecule of the present invention and washed at low stringency (55° C. in 2×SSPE0, 1% SDS). The hybridisation analysis could reveal a simple pattern of only genes encoding polypeptides of the present invention or used in the process of the invention, e.g. having herein-mentioned activity of increasing the fine chemical. A further example of such low-stringent hybridization conditions is 4×SSC at 50° C. or hybridization with 30 to 40% formamide at 42° C. Such molecules comprise those which are fragments, analogues or derivatives of the polypeptide of the invention or used in the process of the invention and differ, for example, by way of amino acid and/or nucleotide deletion(s), insertion(s), substitution (s), addition(s) and/or recombination (s) or any other modification(s) known in the art either alone or in combination from the above-described amino acid sequences or their underlying nucleotide sequence(s). However, it is preferred to use high stringency hybridisation conditions.

[0202] Hybridization should advantageously be carried out with fragments of at least 5, 10, 15, 20, 25, 30, 35 or 40 bp, advantageously at least 50, 60, 70 or 80 bp, preferably at least 90, 100 or 110 bp. Most preferably are fragments of at least 15, 20, 25 or 30 bp. Preferably are also hybridizations with at least 100 bp or 200, very especially preferably at least 400 bp in length. In an especially preferred embodiment, the hybridization should be carried out with the entire nucleic acid sequence with conditions described above.

[0203] The terms “fragment”, “fragment of a sequence” or “part of a sequence” mean a truncated sequence of the original sequence referred to. The truncated sequence (nucleic acid or protein sequence) can vary widely in length; the minimum size being a sequence of sufficient size to provide a sequence with at least a comparable function and/or biological activity of the original sequence referred to or hybidizing with the nucleic acid molecule of the invention or used in the process of the invention under stringend conditions, while the maximum size is not critical. In some applications, the maximum size usually is not substantially greater than that required to provide the desired activity and/or function(s) of the original sequence.

[0204] Typically, the truncated amino acid sequence will range from about 5 to about 260 amino acids in length. More typically, however, the sequence will be a maximum of about 220 amino acids in length, preferably a maximum of about 215 or 100 amino acids. It is usually desirable to select sequences of at least about 100, 120 or 150 amino acids, up to a maximum of about 200 or 250 amino acids.

[0205] The term “epitope” relates to specific immunoreactive sites within an antigen, also known as antigenic determinates. These epitopes can be a linear array of monomers in a polymeric composition—such as amino acids in a protein—or consist of or comprise a more complex secondary or tertiary structure. Those of skill will recognize that immunogens (i.e., substances capable of eliciting an immune response) are antigens; however, some antigen, such as haptens, are not immunogens but may be made immunogenic by coupling to a carrier molecule. The term “antigen” includes references to a substance to which an antibody can be generated and/or to which the antibody is specifically immunoreactive.

[0206] In one embodiment the present invention relates to a epitope of the polypeptide of the present invention or used in the process of the present invention and conferring above mentioned biological activity, preferably conferring an increase in the fine chemical.

[0207] The term “one or several amino acids” relates to at least one amino acid but not more than that number of amino acids, which would result in a homology of below 50% identity. Preferably, the identity is more than 70% or 80%, more preferred are 85%, 90%, 91%, 92%, 93%, 94% or 95%, even more preferred are 96%, 97%, 98%, or 99% identity.

[0208] Further, the nucleic acid molecule of the invention comprises a nucleic acid molecule, which is a complement of one of the nucleotide sequences of above mentioned nucleic acid molecules or a portion thereof. A nucleic acid molecule which is complementary to one of the nucleotide sequences as depicted in SEQ ID NO: 1, 3, 5, 7, 9, 11, 13, 15, 17, 19, 21, 23, 25, 27, 29, 31, 33, 35, 37, 39, 41, 43, 45, 55, 57, 59, 61, 63, 65, 67, 69, 71, 73, 75, 77, 79, 81, 83, 85, 87, 89, 91, 93, 95, 97, 99, 101, 103, 105, 107, 109, 111, 113, 115, 117, 119, 121, 123, 125, 127, 129, 131, 133, 135, 137, 139, 141, 143, 145, 147, 149, 151, 153, 155, 157, 159, 161, 163, 165, 167, 169, 171, 173, 175, 177, 179, 181, 183, 185, 187, 189, 191, 193, 195, 197, 199, 201, 203, 205, 207, 209, 211, 213, 215, 217, 219, 221, 223, 225, 227, 229, 231, 233, 235, 237, 239, 241, 243, 245, 247, 249, 251, 253, 255, 257, 259, 261, 263, 265, 267, 269, 271, 273, 275, 277, 279, 281, 283, 285, 287, 289, 291, 293, 295, 297, 299, 301, 303, 305, 307, 309, 311, 313, 315, 317, 319, 321, 323, 325, 327, 329, 331, 333, 335, 337, 339, 341, 343, 345, 347, 349, 351, 353, 355, 357, 359, 361, 363, 365, 367, 369, 371, 373, 375, 377, 379, 381, 383, 385, 387, 389, 391 or 393 is one which is sufficiently complementary to one of the nucleotide sequences as depicted in SEQ ID NO: 1, 3, 5, 7, 9, 11, 13, 15, 17, 19, 21, 23, 25, 27, 29, 31, 33, 35, 37, 39, 41, 43, 45, 55, 57, 59, 61, 63, 65, 67, 69, 71, 73, 75, 77, 79, 81, 83, 85, 87, 89, 91, 93, 95, 97, 99, 101, 103, 105, 107, 109, 111, 113, 115, 117, 119, 121, 123, 125, 127, 129, 131, 133, 135, 137, 139, 141, 143, 145, 147, 149, 151, 153, 155, 157, 159, 161, 163, 165, 167, 169, 171, 173, 175, 177, 179, 181, 183, 185, 187, 189, 191, 193, 195, 197, 199, 201, 203, 205, 207, 209, 211, 213, 215, 217, 219, 221, 223, 225, 227, 229, 231, 233, 235, 237, 239, 241, 243, 245, 247, 249, 251, 253, 255, 257, 259, 261, 263, 265, 267, 269, 271, 273, 275, 277, 279, 281, 283, 285, 287, 289, 291, 293, 295, 297, 299, 301, 303, 305, 307, 309, 311, 313, 315, 317, 319, 321, 323, 325, 327, 329, 331, 333, 335, 337, 339, 341, 343, 345, 347, 349, 351, 353, 355, 357, 359, 361, 363, 365, 367, 369, 371, 373, 375, 377, 379, 381, 383, 385, 387, 389, 391 or 393 such that it can hybridize to one of the nucleotide sequences as depicted in SEQ ID NO: 1, 3, 5, 7, 9, 11, 13, 15, 17, 19, 21, 23, 25, 27, 29, 31, 33, 35, 37, 39, 41, 43, 45, 55, 57, 59, 61, 63, 65, 67, 69, 71, 73, 75, 77, 79, 81, 83, 85, 87, 89, 91, 93, 95, 97, 99, 101, 103, 105, 107, 109, 111, 113, 115, 117, 119, 121, 123, 125, 127, 129, 131, 133, 135, 137, 139, 141, 143, 145, 147, 149, 151, 153, 155, 157, 159, 161, 163, 165, 167, 169, 171, 173, 175, 177, 179, 181, 183, 185, 187, 189, 191, 193, 195, 197, 199, 201, 203, 205, 207, 209, 211, 213, 215, 217, 219, 221, 223, 225, 227, 229, 231, 233, 235, 237, 239, 241, 243, 245, 247, 249, 251, 253, 255, 257, 259, 261, 263, 265, 267, 269, 271, 273, 275, 277, 279, 281, 283, 285, 287, 289, 291, 293, 295, 297, 299, 301, 303, 305, 307, 309, 311, 313, 315, 317, 319, 321, 323, 325, 327, 329, 331, 333, 335, 337, 339, 341, 343, 345, 347, 349, 351, 353, 355, 357, 359, 361, 363, 365, 367, 369, 371, 373, 375, 377, 379, 381, 383, 385, 387, 389, 391 or 393, thereby forming a stable duplex. Preferably, the hybridisation is performed under stringent hybrization conditions. However, a complement of one of the herein disclosed sequences is preferably a sequence complement thereto according to the base pairing of nucleic acid molecules well known to the skilled person. For example, the bases A and G undergo base pairing with the bases T and U or C, resp. and visa versa. Modifications of the bases can influence the base-pairing partner.

[0209] The nucleic acid molecule of the invention comprises a nucleotide sequence which is at least about 30%, 35%, 40% or 45%, preferably at least about 50%, 55%, 60% or 65%, more preferably at least about 70%, 80%, or 90%, and even more preferably at least about 95%, 97%, 98%, 99% most preferably at least about 99.1%; 99.2%, 99.3%; 99.4%; 99.5%; 99.6%; 99.7%; 99.8% or 99.9% or more homo-logous to a nucleotide sequence as depicted in SEQ ID NO: 1, 3, 5, 7, 9, 11, 13, 15, 17, 19, 21, 23, 25, 27, 29, 31, 33, 35, 37, 39, 41, 43, 45, 55, 57, 59, 61, 63, 65, 67, 69, 71, 73, 75, 77, 79, 81, 83, 85, 87, 89, 91, 93, 95, 97, 99, 101, 103, 105, 107, 109, 111, 113, 115, 117, 119, 121, 123, 125, 127, 129, 131, 133, 135, 137, 139, 141, 143, 145, 147, 149, 151, 153, 155, 157, 159, 161, 163, 165, 167, 169, 171, 173, 175, 177, 179, 181, 183, 185, 187, 189, 191, 193, 195, 197, 199, 201, 203, 205, 207, 209, 211, 213, 215, 217, 219, 221, 223, 225, 227, 229, 231, 233, 235, 237, 239, 241, 243, 245, 247, 249, 251, 253, 255, 257, 259, 261, 263, 265, 267, 269, 271, 273, 275, 277, 279, 281, 283, 285, 287, 289, 291, 293, 295, 297, 299, 301, 303, 305, 307, 309, 311, 313, 315, 317, 319, 321, 323, 325, 327, 329, 331, 333, 335, 337, 339, 341, 343, 345, 347, 349, 351, 353, 355, 357, 359, 361, 363, 365, 367, 369, 371, 373, 375, 377, 379, 381, 383, 385, 387, 389, 391 or 393, or a portion thereof and preferably has above mentioned biological activity, in particular having a fine chemical increasing activity after increasing the biological acitivity of a protein having the biological activity represented by a protein as depicted in SEQ ID NO: 2, 4, 6, 8, 10, 12, 14, 16, 18, 20, 22, 24, 26, 28, 30, 32, 34, 36, 38, 40, 42, 44, 46, 56, 58, 60, 62, 64, 66, 68, 70, 72, 74, 76, 78, 80, 82, 84, 86, 88, 90, 92, 94, 96, 98, 100, 102, 104, 106, 108, 110, 112, 114, 116, 118, 120, 122, 124, 126, 128, 130, 132, 134, 136, 138, 140, 142, 144, 146, 148, 150, 152, 154, 156, 158, 160, 162, 164, 166, 168, 170, 172, 174, 176, 178, 180, 182, 184, 186, 188, 190, 192, 194, 196, 198, 200, 202, 204, 206, 208, 210, 212, 214, 216, 218, 220, 222, 224, 226, 228, 230, 232, 234, 236, 238, 240, 242, 244, 246, 248, 250, 252, 254, 256, 258., 260, 262, 264, 266, 268, 270, 272, 274, 276, 278, 280, 282, 284, 286, 288, 290, 292, 294, 296, 298, 300, 302, 304, 306, 308, 310, 312, 314, 316, 318, 320, 322, 324, 326, 328, 330, 332, 334, 336, 338, 340, 342, 344, 346, 348, 350, 352, 354, 356, 358, 360, 362, 364, 366, 368, 370, 372, 374, 376, 378, 380, 382, 384, 386, 388, 390, 392 or 394 and their respective gene products.

[0210] The nucleic acid molecule of the invention comprises a nucleotide sequence which hybridizes, preferably hybridizes under stringent conditions as defined herein, to one of the nucleotide sequences as depicted in SEQ ID NO: 1, 3, 5, 7, 9, 11, 13, 15, 17, 19, 21, 23, 25, 27, 29, 31, 33, 35, 37, 39, 41, 43, 45, 55, 57, 59, 61, 63, 65, 67, 69, 71, 73, 75, 77, 79, 81, 83, 85, 87, 89, 91, 93, 95, 97, 99, 101, 103, 105, 107, 109, 111, 113, 115, 117, 119, 121, 123, 125, 127, 129, 131, 133, 135, 137, 139, 141, 143, 145, 147, 149, 151, 153, 155, 157, 159, 161, 163, 165, 167, 169, 171, 173, 175, 177, 179, 181, 183, 185, 187, 189, 191, 193, 195, 197, 199, 201, 203, 205, 207, 209, 211, 213, 215, 217, 219, 221, 223, 225, 227, 229, 231, 233, 235, 237, 239, 241, 243, 245, 247, 249, 251, 253, 255, 257, 259, 261, 263, 265, 267, 269, 271, 273, 275, 277, 279, 281, 283, 285, 287, 289, 291, 293, 295, 297, 299, 301, 303, 305, 307, 309, 311, 313, 315, 317, 319, 321, 323, 325, 327, 329, 331, 333, 335, 337, 339, 341, 343, 345, 347, 349, 351, 353, 355, 357, 359, 361, 363, 365, 367, 369, 371, 373, 375, 377, 379, 381, 383, 385, 387, 389, 391 or 393, or a portion thereof and encodes a protein having above-mentioned biological activity, e.g. conferring the fine chemical increase, and optionally, having the biological activity of YNL090W.

[0211] Moreover, the nucleic acid molecule of the invention can comprise only a portion of the coding region of one of the sequences in SEQ ID NO: 1, 3, 5, 7, 9, 11, 13, 15, 17, 19, 21, 23, 25, 27, 29, 31, 33, 35, 37, 39, 41, 43, 45, 55, 57, 59, 61, 63, 65, 67, 69, 71, 73, 75, 77, 79, 81, 83, 85, 87, 89, 91, 93, 95, 97, 99, 101, 103, 105, 107, 109, 111, 113, 115, 117, 119, 121, 123, 125, 127, 129, 131, 133, 135, 137, 139, 141, 143, 145, 147, 149, 151, 153, 155, 157, 159, 161, 163, 165, 167, 169, 171, 173, 175, 177, 179, 181, 183, 185, 187, 189, 191, 193, 195, 197, 199, 201, 203, 205, 207, 209, 211, 213, 215, 217, 219, 221, 223, 225, 227, 229, 231, 233, 235, 237, 239, 241, 243, 245, 247, 249, 251, 253, 255, 257, 259, 261, 263, 265, 267, 269, 271, 273, 275, 277, 279, 281, 283, 285, 287, 289, 291, 293, 295, 297, 299, 301, 303, 305, 307, 309, 311, 313, 315, 317, 319, 321, 323, 325, 327, 329, 331, 333, 335, 337, 339, 341, 343, 345, 347, 349, 351, 353, 355, 357, 359, 361, 363, 365, 367, 369, 371, 373, 375, 377, 379, 381, 383, 385, 387, 389, 391 or 393, for example a fragment which can be used as a probe or primer or a fragment encoding a biologically active portion of the polypeptide of the present invention or of a polypeptide used in the process of the present invention, i.e. having above-mentioned activity, e.g. conferring an increase of methionine if its activity is increased. The nucleotide sequences determined from the cloning of the present protein according to the invention encoding gene allows for the generation of probes and primers designed for use in identifying and/or cloning its homologues in other cell types and organisms. The probe/primer typically comprises substantially purified oligonucleotide. The oligonucleotide typically comprises a region of nucleotide sequence that hybridizes under stringent conditions to at least about 12, 15 preferably about 20 or 25, more preferably about 40, 50 or 75 consecutive nucleotides of a sense strand of one of the sequences set forth, e.g., in SEQ ID NO: 1, 3, 5, 7, 9, 11, 13, 15, 17, 19, 21, 23, 25, 27, 29, 31, 33, 35, 37, 39, 41, 43, 45, 55, 57, 59, 61, 63, 65, 67, 69, 71, 73, 75, 77, 79, 81, 83, 85, 87, 89, 91, 93, 95, 97, 99, 101, 103, 105, 107, 109, 111, 113, 115, 117, 119, 121, 123, 125, 127, 129, 131, 133, 135, 137, 139, 141, 143, 145, 147, 149, 151, 153, 155, 157, 159, 161, 163, 165, 167, 169, 171, 173, 175, 177, 179, 181, 183, 185, 187, 189, 191, 193, 195, 197, 199, 201, 203, 205, 207, 209, 211, 213, 215, 217, 219, 221, 223, 225, 227, 229, 231, 233, 235, 237, 239, 241, 243, 245, 247, 249, 251, 253, 255, 257, 259, 261, 263, 265, 267, 269, 271, 273, 275, 277, 279, 281, 283, 285, 287, 289, 291, 293, 295, 297, 299, 301, 303, 305, 307, 309, 311, 313, 315, 317, 319, 321, 323, 325, 327, 329, 331, 333, 335, 337, 339, 341, 343, 345, 347, 349, 351, 353, 355, 357, 359, 361, 363, 365, 367, 369, 371, 373, 375, 377, 379, 381, 383, 385, 387, 389, 391 or 393, an anti-sense sequence of one of the sequences, e.g., set forth in SEQ ID NO: 1, 3, 5, 7, 9, 11, 13, 15, 17, 19, 21, 23, 25, 27, 29, 31, 33, 35, 37, 39, 41, 43, 45, 55, 57, 59, 61, 63, 65, 67, 69, 71, 73, 75, 77, 79, 81, 83, 85, 87, 89, 91, 93, 95, 97, 99, 101, 103, 105, 107, 109, 111, 113, 115, 117, 119, 121, 123, 125, 127, 129, 131, 133, 135, 137, 139, 141, 143, 145, 147, 149, 151, 153, 155, 157, 159, 161, 163, 165, 167, 169, 171, 173, 175, 177, 179, 181, 183, 185, 187, 189, 191, 193, 195, 197, 199, 201, 203, 205, 207, 209, 211, 213, 215, 217, 219, 221, 223, 225, 227, 229, 231, 233, 235, 237, 239, 241, 243, 245, 247, 249, 251, 253, 255, 257, 259, 261, 263, 265, 267, 269, 271, 273, 275, 277, 279, 281, 283, 285, 287, 289, 291, 293, 295, 297, 299, 301, 303, 305, 307, 309, 311, 313, 315, 317, 319, 321, 323, 325, 327, 329, 331, 333, 335, 337, 339, 341, 343, 345, 347, 349, 351, 353, 355, 357, 359, 361, 363, 365, 367, 369, 371, 373, 375, 377, 379, 381, 383, 385, 387, 389, 391 or 393, or naturally occurring mutants thereof. Primers based on a nucleotide of invention can be used in PCR reactions to clone homologues of the polypeptide of the invention or of the polypeptide used in the process of the invention, e.g. as the primers described in the examples of the present invention, e.g. as shown in the examples. A PCR with the primers shown in SEQ ID NO: 53, SEQ ID NO: 54, SEQ ID NO: 395 or SEQ ID NO: 396 will at least result in a fragment of gene products as depicted in the sequences SEQ ID NO: 1, 3, 5, 7, 9, 11, 13, 15, 17, 19, 21, 23, 25, 27, 29, 31, 33, 35, 37, 39, 41, 43, 45, 55, 57, 59, 61, 63, 65, 67, 69, 71, 73, 75, 77, 79, 81, 83, 85, 87, 89, 91, 93, 95, 97, 99, 101, 103, 105, 107, 109, 111, 113, 115, 117, 119, 121, 123, 125, 127, 129, 131, 133, 135, 137, 139, 141, 143, 145, 147, 149, 151, 153, 155, 157, 159, 161, 163, 165, 167, 169, 171, 173, 175, 177, 179, 181, 183, 185, 187, 189, 191, 193, 195, 197, 199, 201, 203, 205, 207, 209, 211, 213, 215, 217, 219, 221, 223, 225, 227, 229, 231, 233, 235, 237, 239, 241, 243, 245, 247, 249, 251, 253, 255, 257, 259, 261, 263, 265, 267, 269, 271, 273, 275, 277, 279, 281, 283, 285, 287, 289, 291, 293, 295, 297, 299, 301, 303, 305, 307, 309, 311, 313, 315, 317, 319, 321, 323, 325, 327, 329, 331, 333, 335, 337, 339, 341, 343, 345, 347, 349, 351, 353, 355, 357, 359, 361, 363, 365, 367, 369, 371, 373, 375, 377, 379, 381, 383, 385, 387, 389, 391 or 393.

[0212] Primer sets are interchangable. The person skilled in the art knows to combine said primers to result in the desired product, e.g. in a full-length clone or a partial sequence. Probes based on the sequences of the nucleic acid molecule of the invention or used in the process of the present invention can be used to detect transcripts or genomic sequences encoding the same or homologous proteins. The probe can further comprise a label group attached thereto, e.g. the label group can be a radioisotope, a fluorescent compound, an enzyme, or an enzyme co-factor. Such probes can be used as a part of a genomic marker test kit for identifying cells which express an polypepetide of the invention or used in the process of the present invention, such as by measuring a level of an encoding nucleic acid molecule in a sample of cells, e.g., detecting mRNA levels or determining, whether a genomic gene comprising the sequence of the polynucleotide of the invention or used in the processs of the present invention has been mutated or deleted.

[0213] The nucleic acid molecule of the invention encodes a polypeptide or portion thereof which includes an amino acid sequence which is sufficiently homologous to the amino acid sequence as depicted in SEQ ID NO: 2, 4, 6, 8, 10, 12, 14, 16, 18, 20, 22, 24, 26, 28, 30, 32, 34, 36, 38, 40, 42, 44, 46, 56, 58, 60, 62, 64, 66, 68, 70, 72, 74, 76, 78, 80, 82, 84, 86, 88, 90, 92, 94, 96, 98, 100, 102, 104, 106, 108, 110, 112, 114, 116, 118, 120, 122, 124, 126, 128, 130, 132, 134, 136, 138, 140, 142, 144, 146, 148, 150, 152, 154, 156, 158, 160, 162, 164, 166, 168, 170, 172, 174, 176, 178, 180, 182, 184, 186, 188, 190, 192, 194, 196, 198, 200, 202, 204, 206, 208, 210, 212, 214, 216, 218, 220, 222, 224, 226, 228, 230, 232, 234, 236, 238, 240, 242, 244, 246, 248, 250, 252, 254, 256, 258, 260, 262, 264, 266, 268, 270, 272, 274, 276, 278, 280, 282, 284, 286, 288, 290, 292, 294, 296, 298, 300, 302, 304, 306, 308, 310, 312, 314, 316, 318, 320, 322, 324, 326, 328, 330, 332, 334, 336, 338, 340, 342, 344, 346, 348, 350, 352, 354, 356, 358, 360, 362, 364, 366, 368, 370, 372, 374, 376, 378, 380, 382, 384, 386, 388, 390, 392 or 394 such that the protein or portion thereof maintains the ability to participate in the fine chemical production, in particular an amino acid increasing activity as mentioned above or as described in the examples in plants or microorganisms is comprised.

[0214] As used herein, the language “sufficiently homologous” refers to proteins or portions thereof which have amino acid sequences which include a minimum number of identical or equivalent amino acid residues (e.g., an amino acid residue which has a similar side chain as an amino acid residue in one of the sequences of the polypeptide of the present invention) to an amino acid sequence as depicted in SEQ ID NO: 2, 4, 6, 8, 10, 12, 14, 16, 18, 20, 22, 24, 26, 28, 30, 32, 34, 36, 38, 40, 42, 44, 46, 56, 58, 60, 62, 64, 66, 68, 70, 72, 74, 76, 78, 80, 82, 84, 86, 88, 90, 92, 94, 96, 98, 100, 102, 104, 106, 108, 110, 112, 114, 116, 118, 120, 122, 124, 126, 128, 130, 132, 134, 136, 138, 140, 142, 144, 146, 148, 150, 152, 154, 156, 158, 160, 162, 164, 166, 168, 170, 172, 174, 176, 178, 180, 182, 184, 186, 188, 190, 192, 194, 196, 198, 200, 202, 204, 206, 208, 210, 212, 214, 216, 218, 220, 222, 224, 226, 228, 230, 232, 234, 236, 238, 240, 242, 244, 246, 248, 250, 252, 254, 256, 258, 260, 262, 264, 266, 268, 270, 272, 274, 276, 278, 280, 282, 284, 286, 288, 290, 292, 294, 296, 298, 300, 302, 304, 306, 308, 310, 312, 314, 316, 318, 320, 322, 324, 326, 328, 330, 332, 334, 336, 338, 340, 342, 344, 346, 348, 350, 352, 354, 356, 358, 360, 362, 364, 366, 368, 370, 372, 374, 376, 378, 380, 382, 384, 386, 388, 390, 392 or 394 such that the protein or portion thereof is able to participate in the increase of the fine chemical production. For examples having the biological activity represented by a protein as depicted in SEQ ID NO: 2, 4, 6, 8, 10, 12, 14, 16, 18, 20, 22, 24, 26, 28, 30, 32, 34, 36, 38, 40, 42, 44, 46, 56, 58, 60, 62, 64, 66, 68, 70, 72, 74, 76, 78, 80, 82, 84, 86, 88, 90, 92, 94, 96, 98, 100, 102, 104, 106, 108, 110, 112, 114, 116, 118, 120, 122, 124, 126, 128, 130, 132, 134, 136, 138, 140, 142, 144, 146, 148, 150, 152, 154, 156, 158, 160, 162, 164, 166, 168, 170, 172, 174, 176, 178, 180, 182, 184, 186, 188, 190, 192, 194, 196, 198, 200, 202, 204, 206, 208, 210, 212, 214, 216, 218, 220, 222, 224, 226, 228, 230, 232, 234, 236, 238, 240, 242, 244, 246, 248, 250, 252, 254, 256, 258, 260, 262, 264, 266, 268, 270, 272, 274, 276, 278, 280, 282, 284, 286, 288, 290, 292, 294, 296, 298, 300, 302, 304, 306, 308, 310, 312, 314, 316, 318, 320, 322, 324, 326, 328, 330, 332, 334, 336, 338, 340, 342, 344, 346, 348, 350, 352, 354, 356, 358, 360, 362, 364, 366, 368, 370, 372, 374, 376, 378, 380, 382, 384, 386, 388, 390, 392 or 394 are described herein.

[0215] In one embodiment, the nucleic acid molecule of the present invention comprises a nucleic acid that encodes a portion of the protein of the present invention. The protein is at least about 30%, 35%, 40%, 45% or 50%, preferably at least about 55%, 60%, 65% or 70%, and more preferably at least about 75%, 80%, 85%, 90%, 91%, 92%, 93% or 94% and most preferably at least about 95%, 97%, 98%, 99% or more homologous to an entire amino acid sequence of SEQ ID NO: 2, 4, 6, 8, 10, 12, 14, 16, 18, 20, 22, 24, 26, 28, 30, 32, 34, 36, 38, 40, 42, 44, 46, 56, 58, 60, 62, 64, 66, 68, 70, 72, 74, 76, 78, 80, 82, 84, 86, 88, 90, 92, 94, 96, 98, 100, 102, 104, 106, 108, 110, 112, 114, 116, 118, 120, 122, 124, 126, 128, 130, 132, 134, 136, 138, 140, 142, 144, 146, 148, 150, 152, 154, 156, 158, 160, 162, 164, 166, 168, 170, 172, 174, 176, 178, 180, 182, 184, 186, 188, 190, 192, 194, 196, 198, 200, 202, 204, 206, 208, 210, 212, 214, 216, 218, 220, 222, 224, 226, 228, 230, 232, 234, 236, 238, 240, 242, 244, 246, 248, 250, 252, 254, 256, 258, 260, 262, 264, 266, 268, 270, 272, 274, 276, 278, 280, 282, 284, 286, 288, 290, 292, 294, 296, 298, 300, 302, 304, 306, 308, 310, 312, 314, 316, 318, 320, 322, 324, 326, 328, 330, 332, 334, 336, 338, 340, 342, 344, 346, 348, 350, 352, 354, 356, 358, 360, 362, 364, 366, 368, 370, 372, 374, 376, 378, 380, 382, 384, 386, 388, 390, 392 or 394 and having above-mentioned activity, e.g. conferring preferably the increase of the fine chemical.

[0216] Portions of proteins encoded by the nucleic acid molecule of the invention are preferably biologically active, preferably having above-mentioned annotated activity, e.g. conferring an increase of the fine chemical after increase of activity.

[0217] As mentioned herein, the term “biologically active portion” is intended to include a portion, e.g., a domain/motif, that confers increase of the fine chemical or has an immunological activity such that it is binds to an antibody binding specifially to the polypeptide of the present invention or a polypeptide used in the process of the present invention for producing the fine chemical;

[0218] The invention further relates to nucleic acid molecules that differ from one of the nucleotide sequences as depicted in SEQ ID NO: 1, 3, 5, 7, 9, 11, 13, 15, 17, 19, 21, 23, 25, 27, 29, 31, 33, 35, 37, 39, 41, 43, 45, 55, 57, 59, 61, 63, 65, 67, 69, 71, 73, 75, 77, 79, 81, 83, 85, 87, 89, 91, 93, 95, 97, 99, 101, 103, 105, 107, 109, 111, 113, 115, 117, 119, 121, 123, 125, 127, 129, 131, 133, 135, 137, 139, 141, 143, 145, 147, 149, 151, 153, 155, 157, 159, 161, 163, 165, 167, 169, 171, 173, 175, 177, 179, 181, 183, 185, 187, 189, 191, 193, 195, 197, 199, 201, 203, 205, 207, 209, 211, 213, 215, 217, 219, 221, 223, 225, 227, 229, 231, 233, 235, 237, 239, 241, 243, 245, 247, 249, 251, 253, 255, 257, 259, 261, 263, 265, 267, 269, 271, 273, 275, 277, 279, 281, 283, 285, 287, 289, 291, 293, 295, 297, 299, 301, 303, 305, 307, 309, 311, 313, 315, 317, 319, 321, 323, 325, 327, 329, 331, 333, 335, 337, 339, 341, 343, 345, 347, 349, 351, 353, 355, 357, 359, 361, 363, 365, 367, 369, 371, 373, 375, 377, 379, 381, 383, 385, 387, 389, 391 or 393 (and portions thereof) due to degeneracy of the genetic code and thus encode a polypeptide of the present invention, in particular a polypeptide having above mentioned activity, e.g. conferring an increase in the fine chemical in a organism. Advantageously, the nucleic acid molecule of the invention comprises, or in an other embodiment has, a nucleotide sequence encoding a protein comprising, or in an other embodiment having, an amino acid sequence as depicted in SEQ ID NO: 2, 4, 6, 8, 10, 12, 14, 16, 18, 20, 22, 24, 26, 28, 30, 32, 34, 36, 38, 40, 42, 44, 46, 56, 58, 60, 62, 64, 66, 68, 70, 72, 74, 76, 78, 80, 82, 84, 86, 88, 90, 92, 94, 96, 98, 100, 102, 104, 106, 108, 110, 112, 114, 116, 118, 120, 122, 124, 126, 128, 130, 132, 134, 136, 138, 140, 142, 144, 146, 148, 150, 152, 154, 156, 158, 160, 162, 164, 166, 168, 170, 172, 174, 176, 178, 180, 182, 184, 186, 188, 190, 192, 194, 196, 198, 200, 202, 204, 206, 208, 210, 212, 214, 216, 218, 220, 222, 224, 226, 228, 230, 232, 234, 236, 238, 240, 242, 244, 246, 248, 250, 252, 254, 256, 258, 260, 262, 264, 266, 268, 270, 272, 274, 276, 278, 280, 282, 284, 286, 288, 290, 292, 294, 296, 298, 300, 302, 304, 306, 308, 310, 312, 314, 316, 318, 320, 322, 324, 326, 328, 330, 332, 334, 336, 338, 340, 342, 344, 346, 348, 350, 352, 354, 356, 358, 360, 362, 364, 366, 368, 370, 372, 374, 376, 378, 380, 382, 384, 386, 388, 390, 392 or 394 or the functional homologues. In a still further embodiment, the nucleic acid molecule of the invention encodes a full length protein which is substantially homologous to an amino acid sequence as depicted in SEQ ID NO: 2, 4, 6, 8, 10, 12, 14, 16, 18, 20, 22, 24, 26, 28, 30, 32, 34, 36, 38, 40, 42, 44, 46, 56, 58, 60, 62, 64, 66, 68, 70, 72, 74, 76, 78, 80, 82, 84, 86, 88, 90, 92, 94, 96, 98, 100, 102, 104, 106, 108, 110, 112, 114, 116, 118, 120, 122, 124, 126, 128, 130, 132, 134, 136, 138, 140, 142, 144, 146, 148, 150, 152, 154, 156, 158, 160, 162, 164, 166, 168, 170, 172, 174, 176, 178, 180, 182, 184, 186, 188, 190, 192, 194, 196, 198, 200, 202, 204, 206, 208, 210, 212, 214, 216, 218, 220, 222, 224, 226, 228, 230, 232, 234, 236, 238, 240, 242, 244, 246, 248, 250, 252, 254, 256, 258, 260, 262, 264, 266, 268, 270, 272, 274, 276, 278, 280, 282, 284, 286, 288, 290, 292, 294, 296, 298, 300, 302, 304, 306, 308, 310, 312, 314, 316, 318, 320, 322, 324, 326, 328, 330, 332, 334, 336, 338, 340, 342, 344, 346, 348, 350, 352, 354, 356, 358, 360, 362, 364, 366, 368, 370, 372, 374, 376, 378, 380, 382, 384, 386, 388, 390, 392 or 394 or the functional homologues. However, in a preferred embodiment, the nucleic acid molecule of the present invention does not consist of the sequence as depicted in SEQ ID NO: 1, 3, 5, 7, 9, 11, 13, 15, 17, 19, 21, 23, 25, 27, 29, 31, 33, 35, 37, 39, 41, 43, 45, 55, 57, 59, 61, 63, 65, 67, 69, 71, 73, 75, 77, 79, 81, 83, 85, 87, 89, 91, 93, 95, 97, 99, 101, 103, 105, 107, 109, 111, 113, 115, 117, 119, 121, 123, 125, 127, 129, 131, 133, 135, 137, 139, 141, 143, 145, 147, 149, 151, 153, 155, 157, 159, 161, 163, 165, 167, 169, 171, 173, 175, 177, 179, 181, 183, 185, 187, 189, 191, 193, 195, 197, 199, 201, 203, 205, 207, 209, 211, 213, 215, 217, 219, 221, 223, 225, 227, 229, 231, 233, 235, 237, 239, 241, 243, 245, 247, 249, 251, 253, 255, 257, 259, 261, 263, 265, 267, 269, 271, 273, 275, 277, 279, 281, 283, 285, 287, 289, 291, 293, 295, 297, 299, 301, 303, 305, 307, 309, 311, 313, 315, 317, 319, 321, 323, 325, 327, 329, 331, 333, 335, 337, 339, 341, 343, 345, 347, 349, 351, 353, 355, 357, 359, 361, 363, 365, 367, 369, 371, 373, 375, 377, 379, 381, 383, 385, 387, 389, 391 or 393.

[0219] In addition, it will be appreciated by those skilled in the art that DNA sequence polymorphisms that lead to changes in the amino acid sequences may exist within a population. Such genetic polymorphism in the gene encoding the polypeptide of the invention or comprising the nucleic acid molecule of the invention may exist among individuals within a population due to natural variation.

[0220] As used herein, the terms “gene” and “recombinant gene” refer to nucleic acid molecules comprising an open reading frame encoding the polypeptide of the invention or comprising the nucleic acid molecule of the invention or encoding the polypeptide used in the process of the present invention, preferably from a crop plant or from a microorgansim useful for the production of fine chemicals, in particular for the production of the fine chemical. Such natural variations can typically result in 1-5% variance in the nucleotide sequence of the gene. Any and all such nucleotide variations and resulting amino acid polymorphisms in genes encoding a polypeptide of the invention or comprising a the nucleic acid molecule of the invention that are the result of natural variation and that do not alter the functional activity as described are intended to be within the scope of the invention.

[0221] Nucleic acid molecules corresponding to natural variants homologues of a nucleic acid molecule of the invention, which can also be a cDNA, can be isolated based on their homology to the nucleic acid molecules disclosed herein using the nucleic acid molecule of the invention, or a portion thereof, as a hybridization probe according to standard hybridization techniques under stringent hybridization conditions.

[0222] Accordingly, in another embodiment, a nucleic acid molecule of the invention is at least 15, 20, 25 or 30 nucleotides in length. Preferably, it hybridizes under stringent conditions to a nucleic acid molecule comprising a nucleotide sequence of the nucleic acid molecule of the present invention or used in the process of the present invention, e.g. comprising the sequence as depicted in SEQ ID NO: 1, 3, 5, 7, 9, 11, 13, 15, 17, 19, 21, 23, 25, 27, 29, 31, 33, 35, 37, 39, 41, 43, 45, 55, 57, 59, 61, 63, 65, 67, 69, 71, 73, 75, 77, 79, 81, 83, 85, 87, 89, 91, 93, 95, 97, 99, 101, 103, 105, 107, 109, 111, 113, 115, 117, 119, 121, 123, 125, 127, 129, 131, 133, 135, 137, 139, 141, 143, 145, 147, 149, 151, 153, 155, 157, 159, 161, 163, 165, 167, 169, 171, 173, 175, 177, 179, 181, 183, 185, 187, 189, 191, 193, 195, 197, 199, 201, 203, 205, 207, 209, 211, 213, 215, 217, 219, 221, 223, 225, 227, 229, 231, 233, 235, 237, 239, 241, 243, 245, 247, 249, 251, 253, 255, 257, 259, 261, 263, 265, 267, 269, 271, 273, 275, 277, 279, 281, 283, 285, 287, 289, 291, 293, 295, 297, 299, 301, 303, 305, 307, 309, 311, 313, 315, 317, 319, 321, 323, 325, 327, 329, 331, 333, 335, 337, 339, 341, 343, 345, 347, 349, 351, 353, 355, 357, 359, 361, 363, 365, 367, 369, 371, 373, 375, 377, 379, 381, 383, 385, 387, 389, 391 or 393. The nucleic acid molecule is preferably at least 20, 30, 50, 100, 250 or more nucleotides in length.

[0223] The term “hybridizes under stringent conditions” is defined above. In one embodiment, the term “hybridizes under stringent conditions” is intended to describe conditions for hybridization and washing under which nucleotide sequences at least 30%, 40%, 50% or 65% identical to each other typically remain hybridized to each other. Preferably, the conditions are such that sequences at least about 70%, more preferably at least about 75% or 80%, and even more preferably at least about 85%, 90% or 95% or more identical to each other typically remain hybridized to each other.

[0224] Preferably, nucleic acid molecule of the invention that hybridizes under stringent conditions to a sequence as depicted in SEQ ID NO: 1, 3, 5, 7, 9, 11, 13, 15, 17, 19, 21, 23, 25, 27, 29, 31, 33, 35, 37, 39, 41, 43, 45, 55, 57, 59, 61, 63, 65, 67, 69, 71, 73, 75, 77, 79, 81, 83, 85, 87, 89, 91, 93, 95, 97, 99, 101, 103, 105, 107, 109, 111, 113, 115, 117, 119, 121, 123, 125, 127, 129, 131, 133, 135, 137, 139, 141, 143, 145, 147, 149, 151, 153, 155, 157, 159, 161, 163, 165, 167, 169, 171, 173, 175, 177, 179, 181, 183, 185, 187, 189, 191, 193, 195, 197, 199, 201, 203, 205, 207, 209, 211, 213, 215, 217, 219, 221, 223, 225, 227, 229, 231, 233, 235, 237, 239, 241, 243, 245, 247, 249, 251, 253, 255, 257, 259, 261, 263, 265, 267, 269, 271, 273, 275, 277, 279, 281, 283, 285, 287, 289, 291, 293, 295, 297, 299, 301, 303, 305, 307, 309, 311, 313, 315, 317, 319, 321, 323, 325, 327, 329, 331, 333, 335, 337, 339, 341, 343, 345, 347, 349, 351, 353, 355, 357, 359, 361, 363, 365, 367, 369, 371, 373, 375, 377, 379, 381, 383, 385, 387, 389, 391 or 393 corresponds to a naturally-occurring nucleic acid molecule of the invention. As used herein, a “naturally-occurring” nucleic acid molecule refers to an RNA or DNA molecule having a nucleotide sequence that occurs in nature (e.g., encodes a natural protein). Preferably, the nucleic acid molecule encodes a natural protein having above-mentioned activity, e.g. conferring the fine chemical increase after increasing the expression or activity thereof or the activity of a protein of the invention or used in the process of the invention.

[0225] In addition to naturally-occurring variants of the sequences of the polypeptide or nucleic acid molecule of the invention as well as of the polypeptide or nucleic acid molecule used in the process of the invention that may exist in the population, the skilled artisan will further appreciate that changes can be introduced by mutation into a nucleotide sequence of the nucleic acid molecule encoding the polypeptide of the invention or used in the process of the present invention, thereby leading to changes in the amino acid sequence of the encoded polypeptide, without altering the functional ability of the polypeptide, preferably not decreasing said activity.

[0226] For example, nucleotide substitutions leading to amino acid substitutions at “non-essential” amino acid residues can be made in a sequence of the nucleic acid molecule of the invention or used in the process of the invention, e.g. in SEQ ID NO: 1, 3, 5, 7, 9, 11, 13, 15, 17, 19, 21, 23, 25, 27, 29, 31, 33, 35, 37, 39, 41, 43, 45, 55, 57, 59, 61, 63, 65, 67, 69, 71, 73, 75, 77, 79, 81, 83, 85, 87, 89, 91, 93, 95, 97, 99, 101, 103, 105, 107, 109, 111, 113, 115, 117, 119, 121, 123, 125, 127, 129, 131, 133, 135, 137, 139, 141, 143, 145, 147, 149, 151, 153, 155, 157, 159, 161, 163, 165, 167, 169, 171, 173, 175, 177, 179, 181, 183, 185, 187, 189, 191, 193, 195, 197, 199, 201, 203, 205, 207, 209, 211, 213, 215, 217, 219, 221, 223, 225, 227, 229, 231, 233, 235, 237, 239, 241, 243, 245, 247, 249, 251, 253, 255, 257, 259, 261, 263, 265, 267, 269, 271, 273, 275, 277, 279, 281, 283, 285, 287, 289, 291, 293, 295, 297, 299, 301, 303, 305, 307, 309, 311, 313, 315, 317, 319, 321, 323, 325, 327, 329, 331, 333, 335, 337, 339, 341, 343, 345, 347, 349, 351, 353, 355, 357, 359, 361, 363, 365, 367, 369, 371, 373, 375, 377, 379, 381, 383, 385, 387, 389, 391 or 393.

[0227] A “non-essential” amino acid residue is a residue that can be altered from the wild-type sequence of one without altering the activity of said polypeptide, whereas an “essential” amino acid residue is required for an activity as mentioned above, e.g. leading to an increase in the fine chemical in an organism after an increase of activity of the polypeptide. Other amino acid residues, however, (e.g., those that are not conserved or only semi-conserved in the domain having said activity) may not be essential for activity and thus are likely to be amenable to alteration without altering said activity.

[0228] Further, a person skilled in the art knows that the codon usage between organisms can differ. Therefore, he may adapt the codon usage in the nucleic acid molecule of the present invention to the usage of the organism in which the polynuclestide or polypeptide is expressed.

[0229] Accordingly, the invention relates to nucleic acid molecules encoding a polypeptide having above-mentioned biological activity, e.g. conferring an increase in the the fine chemical in an organism or part thereof that contain changes in amino acid residues that are not essential for said activity. Such polypeptides differ in amino acid sequence from a sequence contained in SEQ ID NO: 2, 4, 6, 8, 10, 12, 14, 16, 18, 20, 22, 24, 26, 28, 30, 32, 34, 36, 38, 40, 42, 44, 46, 56, 58, 60, 62, 64, 66, 68, 70, 72, 74, 76, 78, 80, 82, 84, 86, 88, 90, 92, 94, 96, 98, 100, 102, 104, 106, 108, 110, 112, 114, 116, 118, 120, 122, 124, 126, 128, 130, 132, 134, 136, 138, 140, 142, 144, 146, 148, 150, 152, 154, 156, 158, 160, 162, 164, 166, 168, 170, 172, 174, 176, 178, 180, 182, 184, 186, 188, 190, 192, 194, 196, 198, 200, 202, 204, 206, 208, 210, 212, 214, 216, 218, 220, 222, 224, 226, 228, 230, 232, 234, 236, 238, 240, 242, 244, 246, 248, 250, 252, 254, 256, 258, 260, 262, 264, 266, 268, 270, 272, 274, 276, 278, 280, 282, 284, 286, 288, 290, 292, 294, 296, 298, 300, 302, 304, 306, 308, 310, 312, 314, 316, 318, 320, 322, 324, 326, 328, 330, 332, 334, 336, 338, 340, 342, 344, 346, 348, 350, 352, 354, 356, 358, 360, 362, 364, 366, 368, 370, 372, 374, 376, 378, 380, 382, 384, 386, 388, 390, 392 or 394 yet retain said activity described herein. The nucleic acid molecule can comprise a nucleotide sequence encoding a polypeptide, wherein the polypeptide comprises an amino acid sequence at least about 50% identical to an amino acid sequence of SEQ ID NO: 2, 4, 6, 8, 10, 12, 14, 16, 18, 20, 22, 24, 26, 28, 30, 32, 34, 36, 38, 40, 42, 44, 46, 56, 58, 60, 62, 64, 66, 68, 70, 72, 74, 76, 78, 80, 82, 84, 86, 88, 90, 92, 94, 96, 98, 100, 102, 104, 106, 108, 110, 112, 114, 116, 118, 120, 122, 124, 126, 128, 130, 132, 134, 136, 138, 140, 142, 144, 146, 148, 150, 152, 154, 156, 158, 160, 162, 164, 166, 168, 170, 172, 174, 176, 178, 180, 182, 184, 186, 188, 190, 192, 194, 196, 198, 200, 202, 204, 206, 208, 210, 212, 214, 216, 218, 220, 222, 224, 226, 228, 230, 232, 234, 236, 238, 240, 242, 244, 246, 248, 250, 252, 254, 256, 258, 260, 262, 264, 266, 268, 270, 272, 274, 276, 278, 280, 282, 284, 286, 288, 290, 292, 294, 296, 298, 300, 302, 304, 306, 308, 310, 312, 314, 316, 318, 320, 322, 324, 326, 328, 330, 332, 334, 336, 338, 340, 342, 344, 346, 348, 350, 352, 354, 356, 358, 360, 362, 364, 366, 368, 370, 372, 374, 376, 378, 380, 382, 384, 386, 388, 390, 392 or 394 and is capable of participation in the increase of production of the fine chemical after increasing its activity, e.g. its expression. Preferably, the protein encoded by the nucleic acid molecule is at least about 60% identical to the sequence in SEQ ID NO: 2, 4, 6, 8, 10, 12, 14, 16, 18, 20, 22, 24, 26, 28, 30, 32, 34, 36, 38, 40, 42, 44, 46, 56, 58, 60, 62, 64, 66, 68, 70, 72, 74, 76, 78, 80, 82, 84, 86, 88, 90, 92, 94, 96, 98, 100, 102, 104, 106, 108, 110, 112, 114, 116, 118, 120, 122, 124, 126, 128, 130, 132, 134, 136, 138, 140, 142, 144, 146, 148, 150, 152, 154, 156, 158, 160, 162, 164, 166, 168, 170, 172, 174, 176, 178, 180, 182, 184, 186, 188, 190, 192, 194, 196, 198, 200, 202, 204, 206, 208, 210, 212, 214, 216, 218, 220, 222, 224, 226, 228, 230, 232, 234, 236, 238, 240, 242, 244, 246, 248, 250, 252, 254, 256, 258, 260, 262, 264, 266, 268, 270, 272, 274, 276, 278, 280, 282, 284, 286, 288, 290, 292, 294, 296, 298, 300, 302, 304, 306, 308, 310, 312, 314, 316, 318, 320, 322, 324, 326, 328, 330, 332, 334, 336, 338, 340, 342, 344, 346, 348, 350, 352, 354, 356, 358, 360, 362, 364, 366, 368, 370, 372, 374, 376, 378, 380, 382, 384, 386, 388, 390, 392 or 394, more preferably at least about 70% identical to one of the sequences in SEQ ID NO: 2, 4, 6, 8, 10, 12, 14, 16, 18, 20, 22, 24, 26, 28, 30, 32, 34, 36, 38, 40, 42, 44, 46, 56, 58, 60, 62, 64, 66, 68, 70, 72, 74, 76, 78, 80, 82, 84, 86, 88, 90, 92, 94, 96, 98, 100, 102, 104, 106, 108, 110, 112, 114, 116, 118, 120, 122, 124, 126, 128, 130, 132, 134, 136, 138, 140, 142, 144, 146, 148, 150, 152, 154, 156, 158, 160, 162, 164, 166, 168, 170, 172, 174, 176, 178, 180, 182, 184, 186, 188, 190, 192, 194, 196, 198, 200, 202, 204, 206, 208, 210, 212, 214, 216, 218, 220, 222, 224, 226, 228, 230, 232, 234, 236, 238, 240, 242, 244, 246, 248, 250, 252, 254, 256, 258, 260, 262, 264, 266, 268, 270, 272, 274, 276, 278, 280, 282, 284, 286, 288, 290, 292, 294, 296, 298, 300, 302, 304, 306, 308, 310, 312, 314, 316, 318, 320, 322, 324, 326, 328, 330, 332, 334, 336, 338, 340, 342, 344, 346, 348, 350, 352, 354, 356, 358, 360, 362, 364, 366, 368, 370, 372, 374, 376, 378, 380, 382, 384, 386, 388, 390, 392 or 394, even more preferably at least about 80%, 90%, 95% homologous to the sequence in SEQ ID NO: 2, 4, 6, 8, 10, 12, 14, 16, 18, 20, 22, 24, 26, 28, 30, 32, 34, 36, 38, 40, 42, 44, 46, 56, 58, 60, 62, 64, 66, 68, 70, 72, 74, 76, 78, 80, 82, 84, 86, 88, 90, 92, 94, 96, 98, 100, 102, 104, 106, 108, 110, 112, 114, 116, 118, 120, 122, 124, 126, 128, 130, 132, 134, 136, 138, 140, 142, 144, 146, 148, 150, 152, 154, 156, 158, 160, 162, 164, 166, 168, 170, 172, 174, 176, 178, 180, 182, 184, 186, 188, 190, 192, 194, 196, 198, 200, 202, 204, 206, 208, 210, 212, 214, 216, 218, 220, 222, 224, 226, 228, 230, 232, 234, 236, 238, 240, 242, 244, 246, 248, 250, 252, 254, 256, 258, 260, 262, 264, 266, 268, 270, 272, 274, 276, 278, 280, 282, 284, 286, 288, 290, 292, 294, 296, 298, 300, 302, 304, 306, 308, 310, 312, 314, 316, 318, 320, 322, 324, 326, 328, 330, 332, 334, 336, 338, 340, 342, 344, 346, 348, 350, 352, 354, 356, 358, 360, 362, 364, 366, 368, 370, 372, 374, 376, 378, 380, 382, 384, 386, 388, 390, 392 or 394, and most preferably at least about 96%, 97%, 98%, or 99% identical to the sequence in SEQ ID NO: 2, 4, 6, 8, 10, 12, 14, 16, 18, 20, 22, 24, 26, 28, 30, 32, 34, 36, 38, 40, 42, 44, 46, 56, 58, 60, 62, 64, 66, 68, 70, 72, 74, 76, 78, 80, 82, 84, 86, 88, 90, 92, 94, 96, 98, 100, 102, 104, 106, 108, 110, 112, 114, 116, 118, 120, 122, 124, 126, 128, 130, 132, 134, 136, 138, 140, 142, 144, 146, 148, 150, 152, 154, 156, 158, 160, 162, 164, 166, 168, 170, 172, 174, 176, 178, 180, 182, 184, 186, 188, 190, 192, 194, 196, 198, 200, 202, 204, 206, 208, 210, 212, 214, 216, 218, 220, 222, 224, 226, 228, 230, 232, 234, 236, 238, 240, 242, 244, 246, 248, 250, 252, 254, 256, 258, 260, 262, 264, 266, 268, 270, 272, 274, 276, 278, 280, 282, 284, 286, 288, 290, 292, 294, 296, 298, 300, 302, 304, 306, 308, 310, 312, 314, 316, 318, 320, 322, 324, 326, 328, 330, 332, 334, 336, 338, 340, 342, 344, 346, 348, 350, 352, 354, 356, 358, 360, 362, 364, 366, 368, 370, 372, 374, 376, 378, 380, 382, 384, 386, 388, 390, 392 or 394.

[0230] To determine the percentage homology (=identity) of two amino acid sequences or of two nucleic acid molecules, the sequences are written one underneath the other for an optimal comparison (for example gaps may be inserted into the sequence of a protein or of a nucleic acid in order to generate an optimal alignment with the other protein or the other nucleic acid).

[0231] The amino acid residues or nucleic acid molecules at the corresponding amino acid positions or nucleotide positions are then compared. If a position in one sequence is occupied by the same amino acid residue or the same nucleic acid molecule as the corresponding position in the other sequence, the molecules are homologous at this position (i.e. amino acid or nucleic acid “homology” as used in the present context corresponds to amino acid or nucleic acid “identity”. The percentage homology between the two sequences is a function of the number of identical positions shared by the sequences (i.e. % homology=number of identical positions/total number of positions×100). The terms “homology” and “identity” are thus to be considered as synonyms.

[0232] For the determination of the percentage homology (=identity) of two or more amino acids or of two or more nucleotide sequences several computer software programs have been developed. The homology of two or more sequences can be calculated with for example the software fasta, which presently has been used in the version fasta 3 (W. R. Pearson and D. J. Lipman (1988), Improved Tools for Biological Sequence Comparison. PNAS 85:2444-2448; W. R. Pearson (1990) Rapid and Sensitive Sequence Comparison with FASTP and FASTA, Methods in Enzymology 183:63-98; W. R. Pearson and D. J. Lipman (1988) Improved Tools for Biological Sequence Comparison. PNAS 85:2444-2448; W. R. Pearson (1990); Rapid and Sensitive Sequence Comparison with FASTP and FASTA Methods in Enzymology 183:63-98). Another useful program for the calculation of homologies of different sequences is the standard blast program, which is included in the Biomax pedant software (Biomax, Munich, Federal Republic of Germany). This leads unfortunately sometimes to suboptimal results since blast does not always include complete sequences of the subject and the querry. Nevertheless as this program is very efficient it can be used for the comparison of a huge number of sequences. The following settings are typically used for such a comparisons of sequences:

[0233] -p Program Name [String]; -d Database [String]; default=nr; -i Query File [File In]; default=stdin; -e Expectation value (E) [Real]; default=10.0; -m alignment view options: 0=pairwise; 1=query-anchored showing identities; 2=query-anchored no identities; 3=flat query-anchored, show identities; 4=flat query-anchored, no identities; 5=query-anchored no identities and blunt ends; 6=flat query-anchored, no identities and blunt ends; 7=XML Blast output; 8=tabular; 9 tabular with comment lines [Integer]; default=0; -o BLAST report Output File [File Out] Optional; default=stdout; -F Filter query sequence (DUST with blastn, SEG with others) [String]; default=T; -G Cost to open a gap (zero invokes default behavior) [Integer]; default=0; -E Cost to extend a gap (zero invokes default behavior) [Integer]; default=0; -X X dropoff value for gapped alignment (in bits) (zero invokes default behavior); blastn 30, megablast 20, tblastx 0, all others 15 [Integer]; default=0; -I Show GI's in deflines [T/F]; default=F; -q Penalty for a nucleotide mismatch (blastn only) [Integer]; default=−3; -r Reward for a nucleotide match (blastn only) [Integer]; default=1; -v Number of database sequences to show one-line descriptions for (V) [Integer]; default=500; -b Number of database sequence to show alignments for (B) [Integer]; default=250; -f Threshold for extending hits, default if zero; blastp 11, blastn 0, blastx 12, tblastn 13; tblastx 13, megablast 0 [Integer]; default=0; -g Perform gapped alignment (not available with tblastx) [T/F]; default=T; -Q Query Genetic code to use [Integer]; default=1; -D DB Genetic code (for tblast[nx] only) [Integer]; default=1; -a Number of processors to use [Integer]; default=1; -O SeqAlign file [File Out] Optional; -J Believe the query defline [T/F]; default=F; -M Matrix [String]; default=BLOSUM62; -W Word size, default if zero (blastn 11, megablast 28, all others 3) [Integer]; default=0; -z Effective length of the database (use zero for the real size) [Real]; default=0; -K Number of best hits from a region to keep (off by default, if used a value of 100 is recommended) [Integer]; default=0; -P 0 for multiple hit, 1 for single hit [Integer]; default=0; -Y Effective length of the search space (use zero for the real size) [Real]; default=0; -S Query strands to search against database (for blast[nx], and tblastx); 3 is both, 1 is top, 2 is bottom [Integer]; default=3; -T Produce HTML output [T/F]; default=F; -I Restrict search of database to list of GI's [String] Optional; -U Use lower case filtering of FASTA sequence [T/F] Optional; default=F; -y X dropoff value for ungapped extensions in bits (0.0 invokes default behavior); blastn 20, megablast 10, all others 7 [Real]; default=0.0; -Z X dropoff value for final gapped alignment in bits (0.0 invokes default behavior); blastn/megablast 50, tblastx 0, all others 25 [Integer]; default=0; -R PSI-TBLASTN checkpoint file [File In] Optional; -n MegaBlast search [T/F]; default=F; -L Location on query sequence [String] Optional; -A Multiple Hits window size, default if zero (blastn/megablast 0, all others 40 [Integer]; default=0; -w Frame shift penalty (OOF algorithm for blastx) [Integer]; default=0; -t Length of the largest intron allowed in tblastn for linking HSPs (0 disables linking) [Integer]; default=0.

[0234] Results of high quality are reached by using the algorithm of Needleman and Wunsch or Smith and Waterman. Therefore programs based on said algorithms are preferred. Advantageously the comparisons of sequences can be done with the program PileUp (J. Mol. Evolution., 25, 351-360, 1987, Higgins etal., CABIOS, 5 1989: 151-153) or preferably with the programs Gap and BestFit, which are respectively based on the algorithms of Needleman and Wunsch [J. Mol. Biol. 48; 443-453 (1970)] and Smith and Waterman [Adv. Appl. Math. 2; 482-489 (1981)]. Both programs are part of the GCG software-package [Genetics Computer Group, 575 Science Drive, Madison, Wis., USA 53711 (1991); Altschul et al. (1997) Nucleic Acids Res. 25:3389 et seq.]. Therefore preferably the calculations to determine the perentages of sequence homology are done with the program Gap over the whole range of the sequences. The following standard adjustments for the comparison of nucleic acid sequences were used: gap weight: 50, length weight: 3, average match: 10.000, average mismatch: 0.000.

[0235] For example a sequence which has a 80% homology with sequence SEQ ID NO: 1 at the nucleic acid level is understood as meaning a sequence which, upon comparison with the sequence SEQ ID NO: 1 by the above Gap program algorithm with the above parameter set, has a 80% homology.

[0236] In the state of the art, homology between two polypeptides is also understood as meaning the identity of the amino acid sequence over in each case the entire sequence length which is calculated by comparison with the aid of the program algorithm GAP (Wisconsin Package Version 10.0, University of Wisconsin, Genetics Computer Group (GCG), Madison, USA), setting the following parameters:

| | | | |
|---|---|---|---|
| Gap weight: | 8 | Length weight: | 2 |
| Average match: | 2,912 | Average mismatch: | −2,003 |

[0237] For example a sequence which has a 80% homology with sequence SEQ ID NO: 2 at the protein level is understood as meaning a sequence which, upon comparison with the sequence SEQ ID NO: 2 by the above program algorithm with the above parameter set, has a 80% homology.

[0238] Functional equivalents derived from one of the polypeptides as depicted in SEQ ID NO: 2, 4, 6, 8, 10, 12, 14, 16, 18, 20, 22, 24, 26, 28, 30, 32, 34, 36, 38, 40, 42, 44, 46, 56, 58, 60, 62, 64, 66, 68, 70, 72, 74, 76, 78, 80, 82, 84, 86, 88, 90, 92, 94, 96, 98, 100, 102, 104, 106, 108, 110, 112, 114, 116, 118, 120, 122, 124, 126, 128, 130, 132, 134, 136, 138, 140, 142, 144, 146, 148, 150, 152, 154, 156, 158, 160, 162, 164, 166, 168, 170, 172, 174, 176, 178, 180, 182, 184, 186, 188, 190, 192, 194, 196, 198, 200, 202, 204, 206, 208, 210, 212, 214, 216, 218, 220, 222, 224, 226, 228, 230, 232, 234, 236, 238, 240, 242, 244, 246, 248, 250, 252, 254, 256, 258, 260, 262, 264, 266, 268, 270, 272, 274, 276, 278, 280, 282, 284, 286, 288, 290, 292, 294, 296, 298, 300, 302, 304, 306, 308, 310, 312, 314, 316, 318, 320, 322, 324, 326, 328, 330, 332, 334, 336, 338, 340, 342, 344, 346, 348, 350, 352, 354, 356, 358, 360, 362, 364, 366, 368, 370, 372, 374, 376, 378, 380, 382, 384, 386, 388, 390, 392 or 394 according to the invention by substitution, insertion or deletion have at least 30%, 35%, 40%, 45% or 50%, preferably at least 55%, 60%, 65% or 70% by preference at least 80%, especially preferably at least 85% or 90%, 91%, 92%, 93% or 94%, very especially preferably at least 95%, 97%, 98% or 99% homology with one of the polypeptides as shown in SEQ ID NO: 2, 4, 6, 8, 10, 12, 14, 16, 18, 20, 22, 24, 26, 28, 30, 32, 34, 36, 38, 40, 42, 44, 46, 56, 58, 60, 62, 64, 66, 68, 70, 72, 74, 76, 78, 80, 82, 84, 86, 88, 90, 92, 94, 96, 98, 100, 102, 104, 106, 108, 110, 112, 114, 116, 118, 120, 122, 124, 126, 128, 130, 132, 134, 136, 138, 140, 142, 144, 146, 148, 150, 152, 154, 156, 158, 160, 162, 164, 166, 168, 170, 172, 174, 176, 178, 180, 182, 184, 186, 188, 190, 192, 194, 196, 198, 200, 202, 204, 206, 208, 210, 212, 214, 216, 218, 220, 222, 224, 226, 228, 230, 232, 234, 236, 238, 240, 242, 244, 246, 248, 250, 252, 254, 256, 258, 260, 262, 264, 266, 268, 270, 272, 274, 276, 278, 280, 282, 284, 286, 288, 290, 292, 294, 296, 298, 300, 302, 304, 306, 308, 310, 312, 314, 316, 318, 320, 322, 324, 326, 328, 330, 332, 334, 336, 338, 340, 342, 344, 346, 348, 350, 352, 354, 356, 358, 360, 362, 364, 366, 368, 370, 372, 374, 376, 378, 380, 382, 384, 386, 388, 390, 392 or 394 according to the invention and are distinguished by essentially the same properties as the polypeptide as shown in SEQ ID NO: 2, 4, 6, 8, 10, 12, 14, 16, 18, 20, 22, 24, 26, 28, 30, 32, 34, 36, 38, 40, 42, 44, 46, 56, 58, 60, 62, 64, 66, 68, 70, 72, 74, 76, 78, 80, 82, 84, 86, 88, 90, 92, 94, 96, 98, 100, 102, 104, 106, 108, 110, 112, 114, 116, 118, 120, 122, 124, 126, 128, 130, 132, 134, 136, 138, 140, 142, 144, 146, 148, 150, 152, 154, 156, 158, 160, 162, 164, 166, 168, 170, 172, 174, 176, 178, 180, 182, 184, 186, 188, 190, 192, 194, 196, 198, 200, 202, 204, 206, 208, 210, 212, 214, 216, 218, 220, 222, 224, 226, 228, 230, 232, 234, 236, 238, 240, 242, 244, 246, 248, 250, 252, 254, 256, 258, 260, 262, 264, 266, 268, 270, 272, 274, 276, 278, 280, 282, 284, 286, 288, 290, 292, 294, 296, 298, 300, 302, 304, 306, 308, 310, 312, 314, 316, 318, 320, 322, 324, 326, 328, 330, 332, 334, 336, 338, 340, 342, 344, 346, 348, 350, 352, 354, 356, 358, 360, 362, 364, 366, 368, 370, 372, 374, 376, 378, 380, 382, 384, 386, 388, 390, 392 or 394.

[0239] Functional equivalents derived from the nucleic acid sequence as depicted in SEQ ID NO: 1, 3, 5, 7, 9, 11, 13, 15, 17, 19, 21, 23, 25, 27, 29, 31, 33, 35, 37, 39, 41, 43, 45, 55, 57, 59, 61, 63, 65, 67, 69, 71, 73, 75, 77, 79, 81, 83, 85, 87, 89, 91, 93, 95, 97, 99, 101, 103, 105, 107, 109, 111, 113, 115, 117, 119, 121, 123, 125, 127, 129, 131, 133, 135, 137, 139, 141, 143, 145, 147, 149, 151, 153, 155, 157, 159, 161, 163, 165, 167, 169, 171, 173, 175, 177, 179, 181, 183, 185, 187, 189, 191, 193, 195, 197, 199, 201, 203, 205, 207, 209, 211, 213, 215, 217, 219, 221, 223, 225, 227, 229, 231, 233, 235, 237, 239, 241, 243, 245, 247, 249, 251, 253, 255, 257, 259, 261, 263, 265, 267, 269, 271, 273, 275, 277, 279, 281, 283, 285, 287, 289, 291, 293, 295, 297, 299, 301, 303, 305, 307, 309, 311, 313, 315, 317, 319, 321, 323, 325, 327, 329, 331, 333, 335, 337, 339, 341, 343, 345, 347, 349, 351, 353, 355, 357, 359, 361, 363, 365, 367, 369, 371, 373, 375, 377, 379, 381, 383, 385, 387, 389, 391 or 393 according to the invention by substitution, insertion or deletion have at least 30%, 35%, 40%, 45% or 50%, preferably at least 55%, 60%, 65% or 70% by preference at least 80%, especially preferably at least 85% or 90%, 91%, 92%, 93% or 94%, very especially preferably at least 95%, 97%, 98% or 99% homology with one of the polypeptides as shown in SEQ ID NO: 2, 4, 6, 8, 10, 12, 14, 16, 18, 20, 22, 24, 26, 28, 30, 32, 34, 36, 38, 40, 42, 44, 46, 56, 58, 60, 62, 64, 66, 68, 70, 72, 74, 76, 78, 80, 82, 84, 86, 88, 90, 92, 94, 96, 98, 100, 102, 104, 106, 108, 110, 112, 114, 116, 118, 120, 122, 124, 126, 128, 130, 132, 134, 136, 138, 140, 142, 144, 146, 148, 150, 152, 154, 156, 158, 160, 162, 164, 166, 168, 170, 172, 174, 176, 178, 180, 182, 184, 186, 188, 190, 192, 194, 196, 198, 200, 202, 204, 206, 208, 210, 212, 214, 216, 218, 220, 222, 224, 226, 228, 230, 232, 234, 236, 238, 240, 242, 244, 246, 248, 250, 252, 254, 256, 258, 260, 262, 264, 266, 268, 270, 272, 274, 276, 278, 280, 282, 284, 286, 288, 290, 292, 294, 296, 298, 300, 302, 304, 306, 308, 310, 312, 314, 316, 318, 320, 322, 324, 326, 328, 330, 332, 334, 336, 338, 340, 342, 344, 346, 348, 350, 352, 354, 356, 358, 360, 362, 364, 366, 368, 370, 372, 374, 376, 378, 380, 382, 384, 386, 388, 390, 392 or 394 according to the invention and encode polypeptides having essentially the same properties as the polypeptide as shown in SEQ ID NO: 2, 4, 6, 8, 10, 12, 14, 16, 18, 20, 22, 24, 26, 28, 30, 32, 34, 36, 38, 40, 42, 44, 46, 56, 58, 60, 62, 64, 66, 68, 70, 72, 74, 76, 78, 80, 82, 84, 86, 88, 90, 92, 94, 96, 98, 100, 102, 104, 106, 108, 110, 112, 114, 116, 118, 120, 122, 124, 126, 128, 130, 132, 134, 136, 138, 140, 142, 144, 146, 148, 150, 152, 154, 156, 158, 160, 162, 164, 166, 168, 170, 172, 174, 176, 178, 180, 182, 184, 186, 188, 190, 192, 194, 196, 198, 200, 202, 204, 206, 208, 210, 212, 214, 216, 218, 220, 222, 224, 226, 228, 230, 232, 234, 236, 238, 240, 242, 244, 246, 248, 250, 252, 254, 256, 258, 260, 262, 264, 266, 268, 270, 272, 274, 276, 278, 280, 282, 284, 286, 288, 290, 292, 294, 296, 298, 300, 302, 304, 306, 308, 310, 312, 314, 316, 318, 320, 322, 324, 326, 328, 330, 332, 334, 336, 338, 340, 342, 344, 346, 348, 350, 352, 354, 356, 358, 360, 362, 364, 366, 368, 370, 372, 374, 376, 378, 380, 382, 384, 386, 388, 390, 392 or 394.

[0240] “Essentially the same properties” of a functional equivalent is above all understood as meaning that the functional equivalent has above mentioned acitivty, e.g conferring an increase in the fine chemical amount while increasing the amount of protein, activity or function of said functional equivalent in an organism, e.g. a microorgansim, a plant or plant or animal tissue, plant or animal cells or a part of the same.

[0241] A nucleic acid molecule encoding an homologous to a protein sequence of SEQ ID NO: 2, 4, 6, 8, 10, 12, 14, 16, 18, 20, 22, 24, 26, 28, 30, 32, 34, 36, 38, 40, 42, 44, 46, 56, 58, 60, 62, 64, 66, 68, 70, 72, 74, 76, 78, 80, 82, 84, 86, 88, 90, 92, 94, 96, 98, 100, 102, 104, 106, 108, 110, 112, 114, 116, 118, 120, 122, 124, 126, 128, 130, 132, 134, 136, 138, 140, 142, 144, 146, 148, 150, 152, 154, 156, 158, 160, 162, 164, 166, 168, 170, 172, 174, 176, 178, 180, 182, 184, 186, 188, 190, 192, 194, 196, 198, 200, 202, 204, 206, 208, 210, 212, 214, 216, 218, 220, 222, 224, 226, 228, 230, 232, 234, 236, 238, 240, 242, 244, 246, 248, 250, 252, 254, 256, 258, 260, 262, 264, 266, 268, 270, 272, 274, 276, 278, 280, 282, 284, 286, 288, 290, 292, 294, 296, 298, 300, 302, 304, 306, 308, 310, 312, 314, 316, 318, 320, 322, 324, 326, 328, 330, 332, 334, 336, 338, 340, 342, 344, 346, 348, 350, 352, 354, 356, 358, 360, 362, 364, 366, 368, 370, 372, 374, 376, 378, 380, 382, 384, 386, 388, 390, 392 or 394 can be created by introducing one or more nucleotide substitutions, additions or deletions into a nucleotide sequence of the nucleic acid molecule of the present invention, in particular of SEQ ID NO: 1, 3, 5, 7, 9, 11, 13, 15, 17, 19, 21, 23, 25, 27, 29, 31, 33, 35, 37, 39, 41, 43, 45, 55, 57, 59, 61, 63, 65, 67, 69, 71, 73, 75, 77, 79, 81, 83, 85, 87, 89, 91, 93, 95, 97, 99, 101, 103, 105, 107, 109, 111, 113, 115, 117, 119, 121, 123, 125, 127, 129, 131, 133, 135, 137, 139, 141, 143, 145, 147, 149, 151, 153, 155, 157, 159, 161, 163, 165, 167, 169, 171, 173, 175, 177, 179, 181, 183, 185, 187, 189, 191, 193, 195, 197, 199, 201, 203, 205, 207, 209, 211, 213, 215, 217, 219, 221, 223, 225, 227, 229, 231, 233, 235, 237, 239, 241, 243, 245, 247, 249, 251, 253, 255, 257, 259, 261, 263, 265, 267, 269, 271, 273, 275, 277, 279, 281, 283, 285, 287, 289, 291, 293, 295, 297, 299, 301, 303, 305, 307, 309, 311, 313, 315, 317, 319, 321, 323, 325, 327, 329, 331, 333, 335, 337, 339, 341, 343, 345, 347, 349, 351, 353, 355, 357, 359, 361, 363, 365, 367, 369, 371, 373, 375, 377, 379, 381, 383, 385, 387, 389, 391 or 393 such that one or more amino acid substitutions, additions or deletions are introduced into the encoded protein. Mutations can be introduced into the encoding sequences of SEQ ID NO: 1, 3, 5, 7, 9, 11, 13, 15, 17, 19, 21, 23, 25, 27, 29, 31, 33, 35, 37, 39, 41, 43, 45, 55, 57, 59, 61, 63, 65, 67, 69, 71, 73, 75, 77, 79, 81, 83, 85, 87, 89, 91, 93, 95, 97, 99, 101, 103, 105, 107, 109, 111, 113, 115, 117, 119, 121, 123, 125, 127, 129, 131, 133, 135, 137, 139, 141, 143, 145, 147, 149, 151, 153, 155, 157, 159, 161, 163, 165, 167, 169, 171, 173, 175, 177, 179, 181, 183, 185, 187, 189, 191, 193, 195, 197, 199, 201, 203, 205, 207, 209, 211, 213, 215, 217, 219, 221, 223, 225, 227, 229, 231, 233, 235, 237, 239, 241, 243, 245, 247, 249, 251, 253, 255, 257, 259, 261, 263, 265, 267, 269, 271, 273, 275, 277, 279, 281, 283, 285, 287, 289, 291, 293, 295, 297, 299, 301, 303, 305, 307, 309, 311, 313, 315, 317, 319, 321, 323, 325, 327, 329, 331, 333, 335, 337, 339, 341, 343, 345, 347, 349, 351, 353, 355, 357, 359, 361, 363, 365, 367, 369, 371, 373, 375, 377, 379, 381, 383, 385, 387, 389, 391 or 393 by standard techniques, such as site-directed mutagenesis and PCR-mediated mutagenesis.

[0242] Preferably, conservative amino acid substitutions are made at one or more predicted non-essential amino acid residues. A “conservative amino acid substitution” is one in which the amino acid residue is replaced with an amino acid residue having a similar side chain. Families of amino acid residues having similar side chains have been defined in the art. These families include amino acids with basic side chains (e.g., lysine, arginine, histidine), acidic side chains (e.g., aspartic acid, glutamic acid), uncharged polar side chains (e.g., glycine, asparagine, glutamine, serine, threonine, tyrosine, cysteine), nonpolar side chains (e.g., alanine, valine, leucinei isoleucine, proline, phenylalanine, methionine, tryptophan), beta-branched side chains (e.g., threonine, valine, isoleucine) and aromatic side chains (e.g., tyrosine, phenylalanine, tryptophan, histidine).

[0243] Thus, a predicted nonessential amino acid residue in a polypeptide of the invention or a polypeptide used in the process of the invention is preferably replaced with another amino acid residue from the same family. Alternatively, in another embodiment, mutations can be introduced randomly along all or part of a coding sequence of a nucleic acid molecule of the invention or used in the process of the invention, such as by saturation mutagenesis, and the resultant mutants can be screened for activity described herein to identify mutants that retain or even have increased above mentioned activity, e.g. conferring an increase in content of the fine chemical.

[0244] Following mutagenesis of one of the sequences of shown herein, the encoded protein can be expressed recombinantly and the activity of the protein can be determined using, for example, assays described herein (see Examples).

[0245] The highest homology of the nucleic acid molecule used in the process according to the invention was found for the following database entries by Gap search.

[0246] Homologues of the nucleic acid sequences used, with the sequence as depicted in SEQ ID NO: 1, 3, 5, 7, 9, 11, 13, 15, 17, 19, 21, 23, 25, 27, 29, 31, 33, 35, 37, 39, 41, 43, 45, 55, 57, 59, 61, 63, 65, 67, 69, 71, 73, 75, 77, 79, 81, 83, 85, 87, 89, 91, 93, 95, 97, 99, 101, 103, 105, 107, 109, 111, 113, 115, 117, 119, 121, 123, 125, 127, 129, 131, 133, 135, 137, 139, 141, 143, 145, 147, 149, 151, 153, 155, 157, 159, 161, 163, 165, 167, 169, 171, 173, 175, 177, 179, 181, 183, 185, 187, 189, 191, 193, 195, 197, 199, 201, 203, 205, 207, 209, 211, 213, 215, 217, 219, 221, 223, 225, 227, 229, 231, 233, 235, 237, 239, 241, 243, 245, 247, 249, 251, 253, 255, 257, 259, 261, 263, 265, 267, 269, 271, 273, 275, 277, 279, 281, 283, 285, 287, 289, 291, 293, 295, 297, 299, 301, 303, 305, 307, 309, 311, 313, 315, 317, 319, 321, 323, 325, 327, 329, 331, 333, 335, 337, 339, 341, 343, 345, 347, 349, 351, 353, 355, 357, 359, 361, 363, 365, 367, 369, 371, 373, 375, 377, 379, 381, 383, 385, 387, 389, 391 or 393, comprise also allelic variants with at least approximately 30%, 35%, 40% or 45% homology, by preference at least approximately 50%, 60% or 70%, more preferably at least approximately 90%, 91%, 92%, 93%, 94% or 95% and even more preferably at least approximately 96%, 97%, 98%, 99% or more homology with one of the nucleotide sequences shown or the abovementioned derived nucleic acid sequences or their homologues, derivatives or analogues or parts of these. Allelic variants encompass in particular functional variants which can be obtained by deletion, insertion or substitution of nucleotides from the sequences shown, preferably from SEQ ID NO: 1, 3, 5, 7, 9, 11, 13, 15, 17, 19, 21, 23, 25, 27, 29, 31, 33, 35, 37, 39, 41, 43, 45, 55, 57, 59, 61, 63, 65, 67, 69, 71, 73, 75, 77, 79, 81, 83, 85, 87, 89, 91, 93, 95, 97, 99, 101, 103, 105, 107, 109, 111, 113, 115, 117, 119, 121, 123, 125, 127, 129, 131, 133, 135, 137, 139, 141, 143, 145, 147, 149, 151, 153, 155, 157, 159, 161, 163, 165, 167, 169, 171, 173, 175, 177, 179, 181, 183, 185, 187, 189, 191, 193, 195, 197, 199, 201, 203, 205, 207, 209, 211, 213, 215, 217, 219, 221, 223, 225, 227, 229, 231, 233, 235, 237, 239, 241, 243, 245, 247, 249, 251, 253, 255, 257, 259, 261, 263, 265, 267, 269, 271, 273, 275, 277, 279, 281, 283, 285, 287, 289, 291, 293, 295, 297, 299, 301, 303, 305, 307, 309, 311, 313, 315, 317, 319, 321, 323, 325, 327, 329, 331, 333, 335, 337, 339, 341, 343, 345, 347, 349, 351, 353, 355, 357, 359, 361, 363, 365, 367, 369, 371, 373, 375, 377, 379, 381, 383, 385, 387, 389, 391 or 393, or from the derived nucleic acid sequences, the intention being, however, that the enzyme activity or the biological activity of the resulting proteins synthesized is advantageously retained or increased.

[0247] In one embodiment of the present invention, the nucleic acid molecule of the invention or used in the process of the invention comprises the sequences shown in any of the sequences SEQ ID NO: 1, 3, 5, 7, 9, 11, 13, 15, 17, 19, 21, 23, 25, 27, 29, 31, 33, 35, 37, 39, 41, 43, 45, 55, 57, 59, 61, 63, 65, 67, 69, 71, 73, 75, 77, 79, 81, 83, 85, 87, 89, 91, 93, 95, 97, 99, 101, 103, 105, 107, 109, 111, 113, 115, 117, 119, 121, 123, 125, 127, 129, 131, 133, 135, 137, 139, 141, 143, 145, 147, 149, 151, 153, 155, 157, 159, 161, 163, 165, 167, 169, 171, 173, 175, 177, 179, 181, 183, 185, 187, 189, 191, 193, 195, 197, 199, 201, 203, 205, 207, 209, 211, 213, 215, 217, 219, 221, 223, 225, 227, 229, 231, 233, 235, 237, 239, 241, 243, 245, 247, 249, 251, 253, 255, 257, 259, 261, 263, 265, 267, 269, 271, 273, 275, 277, 279, 281, 283, 285, 287, 289, 291, 293, 295, 297, 299, 301, 303, 305, 307, 309, 311, 313, 315, 317, 319, 321, 323, 325, 327, 329, 331, 333, 335, 337, 339, 341, 343, 345, 347, 349, 351, 353, 355, 357, 359, 361, 363, 365, 367, 369, 371, 373, 375, 377, 379, 381, 383, 385, 387, 389, 391 or 393. It is preferred that the nucleic acid molecule comprises as little as possible other nucleotides not shown in any one of SEQ ID NO: 1, 3, 5, 7, 9, 11, 13, 15, 17, 19, 21, 23, 25, 27, 29, 31, 33, 35, 37, 39, 41, 43, 45, 55, 57, 59, 61, 63, 65, 67, 69, 71, 73, 75, 77, 79, 81, 83, 85, 87, 89, 91, 93, 95, 97, 99, 101, 103, 105, 107, 109, 111, 113, 115, 117, 119, 121, 123, 125, 127, 129, 131, 133, 135, 137, 139, 141, 143, 145, 147, 149, 151, 153, 155, 157, 159, 161, 163, 165, 167, 169, 171, 173, 175, 177, 179, 181, 183, 185, 187, 189, 191, 193, 195, 197, 199, 201, 203, 205, 207, 209, 211, 213, 215, 217, 219, 221, 223, 225, 227, 229, 231, 233, 235, 237, 239, 241, 243, 245, 247, 249, 251, 253, 255, 257, 259, 261, 263, 265, 267, 269, 271, 273, 275, 277, 279, 281, 283, 285, 287, 289, 291, 293, 295, 297, 299, 301, 303, 305, 307, 309, 311, 313, 315, 317, 319, 321, 323, 325, 327, 329, 331, 333, 335, 337, 339, 341, 343, 345, 347, 349, 351, 353, 355, 357, 359, 361, 363, 365, 367, 369, 371, 373, 375, 377, 379, 381, 383, 385, 387, 389, 391 or 393. In one embodiment, the nucleic acid molecule comprises less than 500, 400, 300, 200, 100, 90, 80, 70, 60, 50 or 40 further nucleotides. In a further embodiment, the nucleic acid molecule comprises less than 30, 20 or 10 further nucleotides. In one embodiment, the nucleic acid molecule use in the process of the invention is identical to the sequences shown in SEQ ID NO: 1, 3, 5, 7, 9, 11, 13, 15, 17, 19, 21, 23, 25, 27, 29, 31, 33, 35, 37, 39, 41, 43, 45, 55, 57, 59, 61, 63, 65, 67, 69, 71, 73, 75, 77, 79, 81, 83, 85, 87, 89, 91, 93, 95, 97, 99, 101, 103, 105, 107, 109, 111, 113, 115, 117, 119, 121, 123, 125, 127, 129, 131, 133, 135, 137, 139, 141, 143, 145, 147, 149, 151, 153, 155, 157, 159, 161, 163, 165, 167, 169, 171, 173, 175, 177, 179, 181, 183, 185, 187, 189, 191, 193, 195, 197, 199, 201, 203, 205, 207, 209, 211, 213, 215, 217, 219, 221, 223, 225, 227, 229, 231, 233, 235, 237, 239, 241, 243, 245, 247, 249, 251, 253, 255, 257, 259, 261, 263, 265, 267, 269, 271, 273, 275, 277, 279, 281, 283, 285, 287, 289, 291, 293, 295, 297, 299, 301, 303, 305, 307, 309, 311, 313, 315, 317, 319, 321, 323, 325, 327, 329, 331, 333, 335, 337, 339, 341, 343, 345, 347, 349, 351, 353, 355, 357, 359, 361, 363, 365, 367, 369, 371, 373, 375, 377, 379, 381, 383, 385, 387, 389, 391 or 393.

[0248] Also preferred is that the nucleic acid molecule used in the process of the invention encodes a polypeptide comprising the sequence as depicted in SEQ ID NO: 2, 4, 6, 8, 10, 12, 14, 16, 18, 20, 22, 24, 26, 28, 30, 32, 34, 36, 38, 40, 42, 44, 46, 56, 58, 60, 62, 64, 66, 68, 70, 72, 74, 76, 78, 80, 82, 84, 86, 88, 90, 92, 94, 96, 98, 100, 102, 104, 106, 108, 110, 112, 114, 116, 118, 120, 122, 124, 126, 128, 130, 132, 134, 136, 138, 140, 142, 144, 146, 148, 150, 152, 154, 156, 158, 160, 162, 164, 166, 168, 170, 172, 174, 176, 178, 180, 182, 184, 186, 188, 190, 192, 194, 196, 198, 200, 202, 204, 206, 208, 210, 212, 214, 216, 218, 220, 222, 224, 226, 228, 230, 232, 234, 236, 238, 240, 242, 244, 246, 248, 250, 252, 254, 256, 258, 260, 262, 264, 266, 268, 270, 272, 274, 276, 278, 280, 282, 284, 286, 288, 290, 292, 294, 296, 298, 300, 302, 304, 306, 308, 310, 312, 314, 316, 318, 320, 322, 324, 326, 328, 330, 332, 334, 336, 338, 340, 342, 344, 346, 348, 350, 352, 354, 356, 358, 360, 362, 364, 366, 368, 370, 372, 374, 376, 378, 380, 382, 384, 386, 388, 390, 392 or 394. In one embodiment, the nucleic acid molecule encodes less than 150, 130, 100, 80, 60, 50, 40 or 30 further amino acids. In a further embodiment, the encoded polypeptide comprises less than 20, 15, 10, 9, 8, 7, 6 or 5 further amino acids. In one embodiment used in the inventive process, the encoded polypeptide is identical to the sequences as depicted in SEQ ID NO: 2, 4, 6, 8, 10, 12, 14, 16, 18, 20, 22, 24, 26, 28, 30, 32, 34, 36, 38, 40, 42, 44, 46, 56, 58, 60, 62, 64, 66, 68, 70, 72, 74, 76, 78, 80, 82, 84, 86, 88, 90, 92, 94, 96, 98, 100, 102, 104, 106, 108, 110, 112, 114, 116, 118, 120, 122, 124, 126, 128, 130, 132, 134, 136, 138, 140, 142, 144, 146, 148, 150, 152, 154, 156, 158, 160, 162, 164, 166, 168, 170, 172, 174, 176, 178, 180, 182, 184, 186, 188, 190, 192, 194, 196, 198, 200, 202, 204, 206, 208, 210, 212, 214, 216, 218, 220, 222, 224, 226, 228, 230, 232, 234, 236, 238, 240, 242, 244, 246, 248, 250, 252, 254, 256, 258, 260, 262, 264, 266, 268, 270, 272, 274, 276, 278, 280, 282, 284, 286, 288, 290, 292, 294, 296, 298, 300, 302, 304, 306, 308, 310, 312, 314, 316, 318, 320, 322, 324, 326, 328, 330, 332, 334, 336, 338, 340, 342, 344, 346, 348, 350, 352, 354, 356, 358, 360, 362, 364, 366, 368, 370, 372, 374, 376, 378, 380, 382, 384, 386, 388, 390, 392 or 394.

[0249] In one embodiment, the nucleic acid molecule of the invention or used in the process encodes a polypeptide comprising the sequence as depicted in SEQ ID NO: 2, 4, 6, 8, 10, 12, 14, 16, 18, 20, 22, 24, 26, 28, 30, 32, 34, 36, 38, 40, 42, 44, 46, 56, 58, 60, 62, 64, 66, 68, 70, 72, 74, 76, 78, 80, 82, 84, 86, 88, 90, 92, 94, 96, 98, 100, 102, 104, 106, 108, 110, 112, 114, 116, 118, 120, 122, 124, 126, 128, 130, 132, 134, 136, 138, 140, 142, 144, 146, 148, 150, 152, 154, 156, 158, 160, 162, 164, 166, 168, 170, 172, 174, 176, 178, 180, 182, 184, 186, 188, 190, 192, 194, 196, 198, 200, 202, 204, 206, 208, 210, 212, 214, 216, 218, 220, 222, 224, 226, 228, 230, 232, 234, 236, 238, 240, 242, 244, 246, 248, 250, 252, 254, 256, 258, 260, 262, 264, 266, 268, 270, 272, 274, 276, 278, 280, 282, 284, 286, 288, 290, 292, 294, 296, 298, 300, 302, 304, 306, 308, 310, 312, 314, 316, 318, 320, 322, 324, 326, 328, 330, 332, 334, 336, 338, 340, 342, 344, 346, 348, 350, 352, 354, 356, 358, 360, 362, 364, 366, 368, 370, 372, 374, 376, 378, 380, 382, 384, 386, 388, 390, 392 or 394 and comprises less than 100 further nucleotides. In a further embodiment, said nucleic acid molecule comprises less than 30 further nucleotides. In one embodiment, the nucleic acid molecule used in the process is identical to a coding sequence of the sequences as depicted in SEQ ID NO: 1, 3, 5, 7, 9, 11, 13, 15, 17, 19, 21, 23, 25, 27, 29, 31, 33, 35, 37, 39, 41, 43, 45, 55, 57, 59, 61, 63, 65, 67, 69, 71, 73, 75, 77, 79, 81, 83, 85, 87, 89, 91, 93, 95, 97, 99, 101, 103, 105, 107, 109, 111, 113, 115, 117, 119, 121, 123, 125, 127, 129, 131, 133, 135, 137, 139, 141, 143, 145, 147, 149, 151, 153, 155, 157, 159, 161, 163, 165, 167, 169, 171, 173, 175, 177, 179, 181, 183, 185, 187, 189, 191, 193, 195, 197, 199, 201, 203, 205, 207, 209, 211, 213, 215, 217, 219, 221, 223, 225, 227, 229, 231, 233, 235, 237, 239, 241, 243, 245, 247, 249, 251, 253, 255, 257, 259, 261, 263, 265, 267, 269, 271, 273, 275, 277, 279, 281, 283, 285, 287, 289, 291, 293, 295, 297, 299, 301, 303, 305, 307, 309, 311, 313, 315, 317, 319, 321, 323, 325, 327, 329, 331, 333, 335, 337, 339, 341, 343, 345, 347, 349, 351, 353, 355, 357, 359, 361, 363, 365, 367, 369, 371, 373, 375, 377, 379, 381, 383, 385, 387, 389, 391 or 393.

[0250] Polypeptides (=proteins), which still have the essential enzymatic activity of the polypeptide of the present invention conferring an increase of the fine chemical i.e. whose activity is essentially not reduced, are polypeptides with at least 10% or 20%, by preference 30% or 40%, especially preferably 50% or 60%, very especially preferably 80% or 90 or more of the wild type biological activity or enzyme activity, advantageously, the activity is essentially not reduced in comparison with the activity of a polypeptide as depicted in SEQ ID NO: 2, 4, 6, 8, 10, 12, 14, 16, 18, 20, 22, 24, 26, 28, 30, 32, 34, 36, 38, 40, 42, 44, 46, 56, 58, 60, 62, 64, 66, 68, 70, 72, 74, 76, 78, 80, 82, 84, 86, 88, 90, 92, 94, 96, 98, 100, 102, 104, 106, 108, 110, 112, 114, 116, 118, 120, 122, 124, 126, 128, 130, 132, 134, 136, 138, 140, 142, 144, 146, 148, 150, 152, 154, 156, 158, 160, 162, 164, 166, 168, 170, 172, 174, 176, 178, 180, 182, 184, 186, 188, 190, 192, 194, 196, 198, 200, 202, 204, 206, 208, 210, 212, 214, 216, 218, 220, 222, 224, 226, 228, 230, 232, 234, 236, 238, 240, 242, 244, 246, 248, 250, 252, 254, 256, 258, 260, 262, 264, 266, 268, 270, 272, 274, 276, 278, 280, 282, 284, 286, 288, 290, 292, 294, 296, 298, 300, 302, 304, 306, 308, 310, 312, 314, 316, 318, 320, 322, 324, 326, 328, 330, 332, 334, 336, 338, 340, 342, 344, 346, 348, 350, 352, 354, 356, 358, 360, 362, 364, 366, 368, 370, 372, 374, 376, 378, 380, 382, 384, 386, 388, 390, 392 or 394 expressed under identical conditions.

[0251] Homologues of as depicted in SEQ ID NO: 1, 3, 5, 7, 9, 11, 13, 15, 17, 19, 21, 23, 25, 27, 29, 31, 33, 35, 37, 39, 41, 43, 45, 55, 57, 59, 61, 63, 65, 67, 69, 71, 73, 75, 77, 79, 81, 83, 85, 87, 89, 91, 93, 95, 97, 99, 101, 103, 105, 107, 109, 111, 113, 115, 117, 119, 121, 123, 125, 127, 129, 131, 133, 135, 137, 139, 141, 143, 145, 147, 149, 151, 153, 155, 157, 159, 161, 163, 165, 167, 169, 171, 173, 175, 177, 179, 181, 183, 185, 187, 189, 191, 193, 195, 197, 199, 201, 203, 205, 207, 209, 211, 213, 215, 217, 219, 221, 223, 225, 227, 229, 231, 233, 235, 237, 239, 241, 243, 245, 247, 249, 251, 253, 255, 257, 259, 261, 263, 265, 267, 269, 271, 273, 275, 277, 279, 281, 283, 285, 287, 289, 291, 293, 295, 297, 299, 301, 303, 305, 307, 309, 311, 313, 315, 317, 319, 321, 323, 325, 327, 329, 331, 333, 335, 337, 339, 341, 343, 345, 347, 349, 351, 353, 355, 357, 359, 361, 363, 365, 367, 369, 371, 373, 375, 377, 379, 381, 383, 385, 387, 389, 391 or 393 also mean truncated sequences, cDNA, single-stranded DNA or RNA of the coding and noncoding DNA sequence. Homologues of said sequences are also understood as meaning derivatives, which comprise noncoding regions such as, for example, UTRs, terminators, enhancers or promoter variants. The promoters upstream of the nucleotide sequences stated can be modified by one or more nucleotide substitution(s), insertion(s) and/or deletion(s) without, however, interfering with the functionality or activity either of the promoters, the open reading frame (=ORF) or with the 3′-regulatory region such as terminators or other 3′regulatory regions, which are far away from the ORF. It is furthermore possible that the activity of the promoters is increased by modification of their sequence, or that they are replaced completely by more active promoters, even promoters from heterologous organisms. Appropriate promoters are known to the person skilled in the art and are mentioned herein below.

[0252] In a further embodiment, the process according to the present invention comprises the following steps:
[0253] (a) selecting an organism or a part thereof expressing the polypeptide of this invention;
[0254] (b) mutagenizing the selected organism or the part thereof;
[0255] (c) comparing the activity or the expression level of said polypeptide in the mutagenized organism or the part thereof with the activity or the expression of said polypeptide in the selected organisms or the part thereof;
[0256] (d) selecting the mutagenized organisms or parts thereof, which comprise an increased activity or expression level of said polypeptide compared to the selected organism (a) or the part thereof;
[0257] (e) optionally, growing and cultivating the organisms or the parts thereof; and
[0258] (f) recovering, and optionally isolating, the free or bound the fine chemical produced by the selected mutated organisms or parts thereof.

[0259] The organisms or part thereof produce according to the herein mentioned process of the invention an increased level of free and/or protein-bound fine chemical compared to said control or selected organisms or parts thereof.

[0260] Advantageously the seclected organisms are mutagenized according to the invention. According to the invention mutagenesis is any change of the genetic information in the genom of an organism, that means any structural or compositional change in the nucleic acid preferably DNA of an organism that is not caused by normal segregation or genetic recombiantion processes. Such mutations may occur spontaneously, or may be induced by mutagens as described below. Such change can be induced either randomly or selectivly. In both cases the genetic information of the organism is modified. In general this lead to the situation that the activity of the gene product of the relevant genes inside the cells or inside the organism is increased.

[0261] In case of the specific or so called site directed mutagenesis a distinct gene is mutated and thereby its activity and/or the activity or the encoded gene product is repressed, reduced or increased, preferably increased. In the event of a random mutagenesis one or more genes are mutated by chance and their activities and/or the activities of their gene productes are repressed, reduced or increased, preferably increased.

[0262] For the purpose of a mutagenesis of a huge population of organisms, such population can be transformed with a DNA construct, which is useful for the activation of as much as possible genes of an organism, preferably all genes. For example the construct can contain a strong promoter or one or more enhancers, which are capable of transcriptionally activate genes in the vicinity of their integration side. With this method it is possible to statistically mutagenize, eg activate nearly all genes of an organism by the random integration of an activation construct. Afterwards the skilled worker can identify those mutagenized lines in which a gene of the invention has been activated, which in turns leads to the desired increase in the fine chemical production.

[0263] The genes of the invention can also be activated by mutagensis, either of regulatory or coding regions. In the event of a random mutagenesis a huge number of organisms are treated with a mutagenic agent. The amount of said agent and the intensity of the treatment will be chosen in such a manner that statistically nearly every gene is mutated once. The process for the random mutagensis as well as the respective agens is well known by the skilled person. Such methods are disclosed for example by A. M. van Harten [(1998), “Mutation breeding: theory and practical applications”, Cambridge University Press, Cambridge, UK], E Friedberg, G Walker, W Siede [(1995), “DNA Repair and Mutagenesis”, Blackwell Publishing], or K. Sankaranarayanan, J. M. Gentile, L. R. Ferguson [(2000), “Protocols in Mutagenesis”, Elsevier Health Sciences]. As the skilled worker knows the spontaneous mutation rate in the cells of an organism is very low and that a large numer of chemical, physical or biological agents are available for the mutagenesis of organisms. These agents are named as mutagens or mutagenic agents. As mentioned before three different kinds of mutagens (chemical, physical or biological agents) are available.

[0264] There are different classes of chemical mutagens, which can be separated by their mode of action. For example base analogues such as 5-bromouracil, 2-amino purin. Other chemical mutagens are interacting with the DNA such as sulphuric acid, nitrous acid, hydroxylamine; or other alkylating agents such as monofunctional agents like ethyl methanesulfonate, dimethylsulfate, methyl methanesulfonate), bifunctional like dichloroethyl sulphide, Mitomycin, Nitrosoguanidine-dialkylnitrosamine, N-Nitrosoguanidin derivatives, N-alkyl-N-nitro-N-nitroso-guanidine-), ntercalating dyes like Acridine, ethidium bromide).

[0265] Physical mutagens are for example ionizing irradiation (X ray), UV irradiation. Different forms of irradiation are available and they are strong mutagens. Two main classes of irradiation can be distinguished: a) non-ionizing irradiation such as UV light or ionizing irradiation such as X ray. Biological mutagens are for example transposable elements for example IS elements such as IS100, transposons such as Tn5, Tn10, Tn916 or Tn1000 or phages like Mu^{amplac}, P1, T5, λplac etc. Methods for introducing this phage DNA into the appropriate microorganism are well known to the skilled worker (see Microbiology, Third Edition, Eds. Davis, B. D., Dulbecco, R., Eisen, H. N. and Ginsberg, H. S., Harper International Edition, 1980). The common procedure of a transposon mutagenesis is the insertion of a transposable element within a gene or nearby for example in the promotor or terminator region and thereby leading to a loss of the gene function. Procedures to localize the transposon within the genome of the organisms are well known by a person skilled in the art.

[0266] Preferably a chemical or biochemical procedure is used for the mutagenesis of the organisms. A preferred chemical method is the mutagensis with N-methyl-N-nitro-nitrosoguanidine.

[0267] Other biological methods are disclosed by Spee et al. (Nucleic Acids Research, Vol. 21, No. 3, 1993: 777-778). Spee et al. teaches a PCR method using dITP for the random mutagenesis. This method described by Spee et al. was further improved by Rellos et al. (Protein Expr. Purif., 5, 1994: 270-277). The use of an in vitro recombination technique for molecular mutagenesis is described by Stemmer (Proc. Natl. Acad. Sci. USA, Vol. 91, 1994: 10747-10751). Moore et al. (Nature Biotechnology Vol. 14, 1996: 458-467) describe the combination of the PCR and recombination methods for increasing the enzymatic activity of an esterase toward a para-nitrobenzyl ester. Another route to the mutagenesis of enzymes is described by Greener et al. in Methods in Molecular Biology (Vol. 57, 1996: 375-385). Greener et al. use the specific Escherichia coli strain XL1-Red to generate Escherichia coli mutants, which have increased antibiotic resistance.

[0268] In one embodiment, the protein according to the invention or the nucleic acid molecule characterized herein originates from a eukaryotic or prokaryotic organism such as a non-human animal, a plant, a microorganism such as a fungus, yeast, an alga, a diatom or a bacterium. Nucleic acid molecules, which advantageously can be used in the process of the invention originate from yeasts, for example the family Saccharomycetaceae, in particular the genus Saccharomyces, or yeast genera such as Candida, Hansenula, Pichia, Yarrowia, Rhodotorula or Schizosaccharomyces and the especially advantageous from the species Saccharomyces cerevisiae.

[0269] In one embodiment, nucleic acid molecules, which advantageously can be used in the process of the invention orginate from yeast, for example from Saccharomycetaceae, particularly from the genus Saccharomyces advantageously form the species Saccharomyces cerevisiae.

[0270] If, in the process according to the invention, plants are selected as the donor organism, this plant may, in principle, be in any phylogenetic relation of the recipient plant. Donor and recipient plant may belong to the same family, genus, species, variety or line, resulting in an increasing homology between the nucleic acids to be integrated and corresponding parts of the genome of the recipient plant. This also applies analogously to microorganisms as donor and recipient organism. It might also be advantageously to use nuclei acids molecules from very distinct species, since these might exhibit reduced sensitivity against endogenous regulatory mechanisms and such sequences might not be recognized by endogenous silencing mechanisms.

[0271] Accordingly, one embodiment of the application relates to the use of nucleic acid molecules in the process of the invention from plants, e.g. crop plants, e.g. from: B. napus; O. sativa, Glycine max; B. vulgaris, L. japonicus, Z. elegans, Z. mays, C. arietinum, A. thaliana, H. vulgare, N. tabacum, G. hirsutum, P. patens, F. distichus, sunflower linseed or maize or their homologues.

[0272] Accordingly, in one embodiment, the invention relates to a nucleic acid molecule, which comprises a nucleic acid molecule selected from the group consisting of:
[0273] a) nucleic acid molecule encoding of the polypeptide as depicted in SEQ ID NO: 2, 4, 6, 8, 10, 12, 14, 16, 18, 20, 22, 24, 26, 28, 30, 32, 34, 36, 38, 40, 42, 44, 46, 56, 58, 60, 62, 64, 66, 68, 70, 72, 74, 76, 78, 80, 82, 84, 86, 88, 90, 92, 94, 96, 98, 100, 102, 104, 106, 108, 110, 112, 114, 116, 118, 120, 122, 124, 126, 128, 130, 132, 134, 136, 138, 140, 142, 144, 146, 148, 150, 152, 154, 156, 158, 160, 162, 164, 166, 168, 170, 172, 174, 176, 178, 180, 182, 184, 186, 188, 190, 192, 194, 196, 198, 200, 202, 204, 206, 208, 210, 212, 214, 216, 218, 220, 222, 224, 226, 228, 230, 232, 234, 236, 238, 240, 242, 244, 246, 248, 250, 252, 254, 256, 258, 260, 262, 264, 266, 268, 270, 272, 274, 276, 278, 280, 282, 284, 286, 288, 290, 292, 294, 296, 298, 300, 302, 304, 306, 308, 310, 312, 314, 316, 318, 320, 322, 324, 326, 328, 330, 332, 334, 336, 338, 340, 342, 344, 346, 348, 350, 352, 354, 356, 358, 360, 362, 364, 366, 368, 370, 372, 374, 376, 378, 380, 382, 384, 386, 388, 390, 392 or 394 or a fragment thereof, which confers an increase in the amount of fine chemical in an organism or a part thereof;
[0274] b) nucleic acid molecule comprising of the nucleic acid molecule as depicted in SEQ ID NO: 1, 3, 5, 7, 9, 11, 13, 15, 17, 19, 21, 23, 25, 27, 29, 31, 33, 35, 37, 39, 41, 43, 45, 55, 57, 59, 61, 63, 65, 67, 69, 71, 73, 75, 77, 79, 81, 83, 85, 87, 89, 91, 93, 95, 97, 99, 101, 103, 105, 107, 109, 111, 113, 115, 117, 119, 121, 123, 125, 127, 129, 131, 133, 135, 137, 139, 141, 143, 145, 147, 149, 151, 153, 155, 157, 159, 161, 163, 165, 167, 169, 171, 173, 175, 177, 179, 181, 183, 185, 187, 189, 191, 193, 195, 197, 199, 201, 203, 205, 207, 209, 211, 213, 215, 217, 219, 221, 223, 225, 227, 229, 231, 233, 235, 237, 239, 241, 243, 245, 247, 249, 251, 253, 255, 257, 259, 261, 263, 265, 267, 269, 271, 273, 275, 277, 279, 281, 283, 285, 287, 289, 291, 293, 295, 297, 299, 301, 303, 305, 307, 309, 311, 313, 315, 317, 319, 321, 323, 325, 327, 329, 331, 333, 335, 337, 339, 341, 343, 345, 347, 349, 351, 353, 355, 357, 359, 361, 363, 365, 367, 369, 371, 373, 375, 377, 379, 381, 383, 385, 387, 389, 391 or 393 or a fragment thereof, which confers an increase in the amount of fine chemical in an organism or a part thereof;
[0275] c) nucleic acid molecule whose sequence can be deduced from a polypeptide sequence encoded by a nucleic acid molecule of (a) or (b) as a result of the degeneracy of the genetic code and conferring an increase in the amount of fine chemical in an organism or a part thereof;
[0276] d) nucleic acid molecule which encodes a polypeptide which has at least 50% identity with the amino acid sequence of the polypeptide encoded by the nucleic acid molecule of (a) to (c) and conferring an increase in the amount of fine chemical in an organism or a part thereof;
[0277] e) nucleic acid molecule which hybridizes with a nucleic acid molecule of (a) to (c) under stringent hybridization conditions and conferring an increase in the amount of fine chemical in an organism or a part thereof;
[0278] f) nucleic acid molecule encoding a polypeptide, the polypeptide being derived by substituting, deleting and/or adding one or more amino acids of the amino acid sequence of the polypeptide encoded by the nucleic acid molecules (a) to (d), preferably to (a) to (c), and conferring an increase in the amount of the fine chemical in an organism or a part thereof;
[0279] g) nucleic acid molecule encoding a fragment or an epitope of a polypeptide which is encoded by one of the nucleic acid molecules of (a) to (e), preferably to (a) to (c) and conferring an increase in the amount of the fine chemical in an organism or a part thereof;
[0280] h) nucleic acid molecule which encompasses a nucleic acid molecule which is obtained by amplifying nucleic acid molecules from a cDNA library or a genomic library using the primers in SEQ ID NO: 53, SEQ ID NO: 54, SEQ ID NO: 395 or SEQ ID NO: 396 and conferring an increase in the amount of the fine chemical in an organism or a part thereof;
[0281] i) nucleic acid molecule encoding a polypeptide which is isolated, e.g. from a expression library, with the aid of monoclonal and/or polyclonal antibodies against a polypeptide encoded by one of the nucleic acid molecules of (a) to (g), preferably to (a) to (c) and conferring an increase in the amount of the fine chemical in an organism or a part thereof;
[0282] j) nucleic acid molecule encoding a polypeptide comprising the consensus sequence as depicted in SEQ ID NO: 47, SEQ ID NO: 48, SEQ ID NO: 49, SEQ ID NO: 50, SEQ ID NO: 51, SEQ ID NO: 52, SEQ ID NO: 397, SEQ ID NO: 398, SEQ ID NO: 399 and/or SEQ ID NO: 400 and conferring an increase in the amount of the fine chemical in an organism or a part thereof; and/or
[0283] k) nucleic acid molecule which is obtainable by screening a suitable nucleic acid library under stringent hybridization conditions with a probe comprising one of the sequences of the nucleic acid molecule of (a) to (k) or with a fragment of at least 15 nt, preferably 20 nt, 30 nt, 50 nt, 100 nt, 200 nt or 500 nt of the nucleic acid molecule characterized in (a) to (h) or of the nucleic acid molecule as depicted in SEQ ID NO: 1, 3, 5, 7, 9, 11, 13, 15, 17, 19, 21, 23, 25, 27, 29, 31, 33, 35, 37, 39, 41, 43, 45, 55, 57, 59, 61, 63, 65, 67, 69, 71, 73, 75, 77, 79, 81, 83, 85, 87, 89, 91, 93, 95, 97, 99, 101, 103, 105, 107, 109, 111, 113, 115, 117, 119, 121, 123, 125, 127, 129, 131, 133, 135, 137, 139, 141, 143, 145, 147, 149, 151, 153, 155, 157, 159, 161, 163, 165, 167, 169, 171, 173, 175, 177, 179, 181, 183, 185, 187, 189, 191, 193, 195, 197, 199, 201, 203, 205, 207, 209, 211, 213, 215, 217, 219, 221, 223, 225, 227, 229, 231, 233, 235, 237, 239, 241, 243, 245, 247, 249, 251, 253, 255, 257, 259, 261, 263, 265, 267, 269, 271, 273, 275, 277, 279, 281, 283, 285, 287, 289, 291, 293, 295, 297, 299, 301, 303, 305, 307, 309, 311, 313, 315, 317, 319, 321, 323, 325, 327, 329, 331, 333, 335, 337, 339, 341, 343, 345, 347, 349, 351, 353, 355, 357, 359, 361, 363, 365, 367, 369, 371, 373, 375, 377, 379, 381, 383, 385, 387, 389, 391 or 393 or a nucleic acid molecule encoding, preferably at least the mature form of, the polypeptide as depicted in SEQ ID NO: 2, 4, 6, 8, 10, 12, 14, 16, 18, 20, 22, 24, 26, 28, 30, 32, 34, 36, 38, 40, 42, 44, 46, 56, 58, 60, 62, 64, 66, 68, 70, 72, 74, 76, 78, 80, 82, 84, 86, 88, 90, 92, 94, 96, 98, 100, 102, 104, 106, 108, 110, 112, 114, 116, 118, 120, 122, 124, 126, 128, 130, 132, 134, 136, 138, 140, 142, 144, 146, 148, 150, 152, 154, 156, 158, 160, 162, 164, 166, 168, 170, 172, 174, 176, 178, 180, 182, 184, 186, 188, 190, 192, 194, 196, 198, 200, 202, 204, 206, 208, 210, 212, 214, 216, 218, 220, 222, 224, 226, 228, 230, 232, 234, 236, 238, 240, 242, 244, 246, 248, 250, 252, 254, 256, 258, 260, 262, 264, 266, 268, 270, 272, 274, 276, 278, 280, 282, 284, 286, 288, 290, 292, 294, 296, 298, 300, 302, 304, 306, 308, 310, 312, 314, 316, 318, 320, 322, 324, 326, 328, 330, 332, 334, 336, 338, 340, 342, 344, 346, 348, 350, 352, 354, 356, 358, 360, 362, 364, 366, 368, 370, 372, 374, 376, 378, 380, 382, 384, 386, 388, 390, 392 or 394, and conferring an increase in the amount of the fine chemical in an organism or a part thereof;
   or which encompasses a sequence which is complementary thereto;
   whereby, preferably, the nucleic acid molecule according to (a) to (k) distinguishes over the sequence as depicted in SEQ ID NO: 1, 3, 5, 7, 9, 11, 13, 15, 17, 19, 21, 23, 25, 27, 29, 31, 33, 35, 37, 39, 41, 43, 45, 55, 57, 59, 61, 63, 65, 67, 69, 71, 73, 75, 77, 79, 81, 83, 85, 87, 89, 91, 93, 95, 97, 99, 101, 103, 105, 107, 109, 111, 113, 115, 117, 119, 121, 123, 125, 127, 129, 131, 133, 135, 137, 139, 141, 143, 145, 147, 149, 151, 153, 155, 157, 159, 161, 163, 165, 167, 169, 171, 173, 175, 177, 179, 181, 183, 185, 187, 189, 191, 193, 195, 197, 199, 201, 203, 205, 207, 209, 211, 213, 215, 217, 219, 221, 223, 225, 227, 229, 231, 233, 235, 237, 239, 241, 243, 245, 247, 249, 251, 253, 255, 257, 259, 261, 263, 265, 267, 269, 271, 273, 275, 277, 279, 281, 283, 285, 287, 289, 291, 293, 295, 297, 299, 301, 303, 305, 307, 309, 311, 313, 315, 317, 319, 321, 323, 325, 327, 329, 331, 333, 335, 337, 339, 341, 343, 345, 347, 349, 351, 353, 355, 357, 359, 361, 363, 365, 367, 369, 371, 373, 375, 377, 379, 381, 383, 385, 387, 389, 391 or 393 by one or more nucleotides. In one embodiment, the nucleic acid molecule of the invention does not consist of the sequence as depicted in SEQ ID NO: 1, 3, 5, 7, 9, 11, 13, 15, 17, 19, 21, 23, 25, 27, 29, 31, 33, 35, 37, 39, 41, 43, 45, 55, 57, 59, 61, 63, 65, 67, 69, 71, 73, 75, 77, 79, 81, 83, 85, 87, 89, 91, 93, 95, 97, 99, 101, 103, 105, 107, 109, 111, 113, 115, 117, 119, 121, 123, 125, 127, 129, 131, 133, 135, 137, 139, 141, 143, 145, 147, 149, 151, 153, 155, 157, 159, 161, 163, 165, 167, 169, 171, 173, 175, 177, 179, 181, 183, 185, 187, 189, 191, 193, 195, 197, 199, 201, 203, 205, 207, 209, 211, 213, 215, 217, 219, 221, 223, 225, 227, 229, 231, 233, 235, 237, 239, 241, 243, 245, 247, 249, 251, 253, 255, 257, 259, 261, 263, 265, 267, 269, 271, 273, 275, 277, 279, 281, 283, 285, 287, 289, 291, 293, 295, 297, 299, 301, 303, 305, 307, 309, 311, 313, 315, 317, 319, 321, 323, 325, 327, 329, 331, 333, 335, 337, 339, 341, 343, 345, 347, 349, 351, 353, 355, 357, 359, 361, 363, 365, 367, 369, 371, 373, 375, 377, 379, 381, 383, 385, 387, 389, 391 or 393. In an other embodiment, the nucleic acid molecule of the present invention is at least 30% identical and less than 100%, 99.999%, 99.99%, 99.9% or 99% identical to the sequence as depicted in SEQ ID NO: 1, 3, 5, 7, 9, 11, 13, 15, 17, 19, 21, 23, 25, 27, 29, 31, 33, 35, 37, 39, 41, 43, 45, 55, 57, 59, 61, 63, 65, 67, 69, 71, 73, 75, 77, 79, 81, 83, 85, 87, 89, 91, 93, 95, 97, 99, 101, 103, 105, 107, 109, 111, 113, 115, 117, 119, 121, 123, 125, 127, 129, 131, 133, 135, 137, 139, 141, 143, 145, 147, 149, 151, 153, 155, 157, 159, 161, 163, 165, 167, 169, 171, 173, 175, 177, 179, 181, 183, 185, 187, 189, 191, 193, 195, 197, 199, 201, 203, 205, 207, 209, 211, 213, 215, 217, 219, 221, 223, 225, 227, 229, 231, 233, 235, 237, 239, 241, 243, 245, 247, 249, 251, 253, 255, 257, 259, 261, 263, 265, 267, 269, 271, 273, 275, 277, 279, 281, 283, 285, 287, 289, 291, 293, 295, 297, 299, 301, 303, 305, 307, 309, 311, 313, 315, 317, 319, 321, 323, 325, 327, 329, 331, 333, 335, 337, 339, 341, 343, 345, 347, 349, 351, 353, 355, 357, 359, 361, 363, 365, 367, 369, 371, 373, 375, 377, 379, 381, 383, 385, 387, 389, 391 or 393. In a further embodiment the nucleic acid molecule does not encode the polypeptide sequence as depicted in SEQ ID NO: 2, 4, 6, 8, 10, 12, 14, 16, 18, 20, 22, 24, 26, 28, 30, 32, 34, 36, 38, 40, 42, 44, 46, 56, 58, 60, 62, 64, 66, 68, 70, 72, 74, 76, 78, 80, 82, 84, 86, 88, 90, 92, 94, 96, 98, 100, 102, 104, 106, 108, 110, 112, 114, 116, 118, 120, 122, 124, 126, 128, 130, 132, 134, 136, 138, 140, 142, 144, 146, 148, 150, 152, 154, 156, 158, 160, 162, 164, 166, 168, 170, 172, 174, 176, 178, 180, 182, 184, 186, 188, 190, 192, 194, 196, 198, 200, 202, 204, 206, 208, 210, 212, 214, 216, 218, 220, 222, 224, 226, 228, 230, 232, 234, 236, 238, 240, 242, 244, 246, 248, 250, 252, 254, 256, 258, 260, 262, 264, 266, 268, 270, 272, 274, 276, 278, 280, 282, 284, 286, 288, 290, 292, 294, 296, 298, 300, 302, 304, 306, 308, 310, 312, 314, 316, 318, 320, 322, 324, 326, 328, 330, 332, 334, 336, 338, 340, 342, 344, 346, 348, 350, 352, 354, 356, 358, 360, 362, 364, 366, 368, 370, 372, 374, 376, 378, 380, 382, 384, 386, 388, 390, 392 or 394. Accordingly, in one embodiment, the nucleic acid molecule of the present invention encodes in one embodiment a polypeptide which differs at least in one or more amino acids from the polypeptide as depicted in SEQ ID NO: 2, 4, 6, 8, 10, 12, 14, 16, 18, 20, 22, 24, 26, 28, 30, 32, 34, 36, 38, 40, 42, 44, 46, 56, 58, 60, 62, 64, 66, 68, 70, 72, 74, 76, 78, 80, 82, 84, 86, 88, 90, 92, 94, 96, 98, 100, 102, 104, 106, 108, 110, 112, 114, 116, 118, 120, 122, 124, 126, 128, 130, 132, 134, 136, 138, 140, 142, 144, 146, 148, 150, 152, 154, 156, 158, 160, 162, 164, 166, 168, 170, 172, 174, 176, 178, 180, 182, 184, 186, 188, 190, 192, 194, 196, 198, 200, 202, 204, 206, 208, 210, 212, 214, 216, 218, 220, 222, 224, 226, 228, 230, 232, 234, 236, 238, 240, 242, 244, 246, 248, 250, 252, 254, 256, 258, 260, 262, 264, 266, 268, 270, 272, 274, 276, 278, 280, 282, 284, 286, 288, 290, 292, 294, 296, 298, 300, 302, 304, 306, 308, 310, 312, 314, 316, 318, 320, 322, 324, 326, 328, 330, 332, 334, 336, 338, 340, 342, 344, 346, 348, 350, 352, 354, 356, 358, 360, 362, 364, 366, 368, 370, 372, 374, 376, 378, 380, 382, 384, 386, 388, 390, 392 or 394. In another embodiment, the nucleic acid molecule as depicted in SEQ ID NO: 1, 3, 5, 7, 9, 11, 13, 15, 17, 19, 21, 23, 25, 27, 29, 31, 33, 35, 37, 39, 41, 43, 45, 55, 57, 59, 61, 63, 65, 67, 69, 71, 73, 75, 77, 79, 81, 83, 85, 87, 89, 91, 93, 95, 97, 99, 101, 103, 105, 107, 109, 111, 113, 115, 117, 119, 121, 123, 125, 127, 129, 131, 133, 135, 137, 139, 141, 143, 145, 147, 149, 151, 153, 155, 157, 159, 161, 163, 165, 167, 169, 171, 173, 175, 177, 179, 181, 183, 185, 187, 189, 191, 193, 195, 197, 199, 201, 203, 205, 207, 209, 211, 213, 215, 217, 219, 221, 223, 225, 227, 229, 231, 233, 235, 237, 239, 241, 243, 245, 247, 249, 251, 253, 255, 257, 259, 261, 263, 265, 267, 269, 271, 273, 275, 277, 279, 281, 283, 285, 287, 289, 291, 293, 295, 297, 299, 301, 303, 305, 307, 309, 311, 313, 315, 317, 319, 321, 323, 325, 327, 329, 331, 333, 335, 337, 339, 341, 343, 345, 347, 349, 351, 353, 355, 357, 359, 361, 363, 365, 367, 369, 371, 373, 375, 377, 379, 381, 383, 385, 387, 389, 391 or 393 does not encode a protein of the sequence as depicted in SEQ ID NO: 2, 4, 6, 8, 10, 12, 14, 16, 18, 20, 22, 24, 26, 28, 30, 32, 34, 36, 38, 40, 42, 44, 46, 56, 58, 60, 62, 64, 66, 68, 70, 72, 74, 76, 78, 80, 82, 84, 86, 88, 90, 92, 94, 96, 98, 100, 102, 104, 106, 108, 110, 112, 114, 116, 118, 120, 122, 124, 126, 128, 130, 132, 134, 136, 138, 140, 142, 144, 146, 148, 150, 152, 154, 156, 158, 160, 162, 164, 166, 168, 170, 172, 174, 176, 178, 180, 182, 184, 186, 188, 190, 192, 194, 196, 198, 200, 202, 204, 206, 208, 210, 212, 214, 216, 218, 220, 222, 224, 226, 228, 230, 232, 234, 236, 238, 240, 242, 244, 246, 248, 250, 252, 254, 256, 258, 260, 262, 264, 266, 268, 270, 272, 274, 276, 278, 280, 282, 284, 286, 288, 290, 292, 294, 296, 298, 300, 302, 304, 306, 308, 310, 312, 314, 316, 318, 320, 322, 324, 326, 328, 330, 332, 334, 336, 338, 340, 342, 344, 346, 348, 350, 352, 354, 356, 358, 360, 362, 364, 366, 368, 370, 372, 374, 376, 378, 380, 382, 384, 386, 388, 390, 392 or 394. Accordingly, in one embodiment, the protein encoded by a sequences of a nucleic acid accoriding to (a) to (k) does not consist of the sequence as depicted in SEQ ID NO: 2, 4, 6, 8, 10, 12, 14, 16, 18, 20, 22, 24, 26, 28, 30, 32, 34, 36, 38, 40, 42, 44, 46, 56, 58, 60, 62, 64, 66, 68, 70, 72, 74, 76, 78, 80, 82, 84, 86, 88, 90, 92, 94, 96, 98, 100, 102, 104, 106, 108, 110, 112, 114, 116, 118, 120, 122, 124, 126, 128, 130, 132, 134, 136, 138, 140, 142, 144, 146, 148, 150, 152, 154, 156, 158, 160, 162, 164, 166, 168, 170, 172, 174, 176, 178, 180, 182, 184, 186, 188, 190, 192, 194, 196, 198, 200, 202, 204, 206, 208, 210, 212, 214, 216, 218, 220, 222, 224, 226, 228, 230, 232, 234, 236, 238, 240, 242, 244, 246, 248, 250, 252, 254, 256, 258, 260, 262, 264, 266, 268, 270, 272, 274, 276, 278, 280, 282, 284, 286, 288, 290, 292, 294, 296, 298, 300, 302, 304, 306, 308, 310, 312, 314, 316, 318, 320, 322, 324, 326, 328, 330, 332, 334, 336, 338, 340, 342, 344, 346, 348, 350, 352, 354, 356, 358, 360, 362, 364, 366, 368, 370, 372, 374, 376, 378, 380, 382, 384, 386, 388, 390, 392 or 394. In a further embodiment, the protein of the present invention is at least 30% identical to protein sequence as depicted in SEQ ID NO: 2, 4, 6, 8, 10, 12, 14, 16, 18, 20, 22, 24, 26, 28, 30, 32, 34, 36, 38, 40, 42, 44, 46, 56, 58, 60, 62, 64, 66, 68, 70, 72, 74, 76, 78, 80, 82, 84, 86, 88, 90, 92, 94, 96, 98, 100, 102, 104, 106, 108, 110, 112, 114, 116, 118, 120, 122, 124, 126, 128, 130, 132, 134, 136, 138, 140, 142, 144, 146, 148, 150, 152, 154, 156, 158, 160, 162, 164, 166, 168, 170, 172, 174, 176, 178, 180, 182, 184, 186, 188, 190, 192, 194, 196, 198, 200, 202, 204, 206, 208, 210, 212, 214, 216, 218, 220, 222, 224, 226, 228, 230, 232, 234, 236, 238, 240, 242, 244, 246, 248, 250, 252, 254, 256, 258, 260, 262, 264, 266, 268, 270, 272, 274, 276, 278, 280, 282, 284, 286, 288, 290, 292, 294, 296, 298, 300, 302, 304, 306, 308, 310, 312, 314, 316, 318, 320, 322, 324, 326, 328, 330, 332, 334, 336, 338, 340, 342, 344, 346, 348, 350, 352, 354, 356, 358, 360, 362, 364, 366, 368, 370, 372, 374, 376, 378, 380, 382, 384, 386, 388, 390, 392 or 394 and less than 100%, preferably less than 99.999%, 99.99% or 99.9%, more preferably less than 99%, 98%, 97%, 96% or 95% identical to the sequence as depicted in SEQ ID NO: 2, 4, 6, 8, 10, 12, 14, 16, 18, 20, 22, 24, 26, 28, 30, 32, 34, 36, 38, 40, 42, 44, 46, 56, 58, 60, 62, 64, 66, 68, 70, 72, 74, 76, 78, 80, 82, 84, 86, 88, 90, 92, 94, 96, 98, 100, 102, 104, 106, 108, 110, 112, 114, 116, 118, 120, 122, 124, 126, 128, 130, 132, 134, 136, 138, 140, 142, 144, 146, 148, 150, 152, 154, 156, 158, 160, 162, 164, 166, 168, 170, 172, 174, 176, 178, 180, 182, 184, 186, 188, 190, 192, 194, 196, 198, 200, 202, 204, 206, 208, 210, 212, 214, 216, 218, 220, 222, 224, 226, 228, 230, 232, 234, 236, 238, 240, 242, 244, 246, 248, 250, 252, 254, 256, 258, 260, 262, 264, 266, 268, 270, 272, 274, 276, 278, 280, 282, 284, 286, 288, 290, 292, 294, 296, 298, 300, 302, 304, 306, 308, 310, 312, 314, 316, 318, 320, 322, 324, 326, 328, 330, 332, 334, 336, 338, 340, 342, 344, 346, 348, 350, 352, 354, 356, 358, 360, 362, 364, 366, 368, 370, 372, 374, 376, 378, 380, 382, 384, 386, 388, 390, 392 or 394.

[0284] The nucleic acid sequences used in the process are advantageously introduced in a nucleic acid construct, preferably an expression cassette, which makes the expression of the nucleic acid molecules in an organism, advantageously a plant or a microorganism possible.

[0285] Accordingly, the invention also relates to a nucleic acid construct, preferably to an expression construct, comprising the nucleic acid molecule of the present invention functionally linked to one or more regulatory elements or signals.

[0286] As described herein, the nucleic acid construct can also comprise further genes, which are introduced into the organisms or cells. It is possible and advantageous to introduce into, and express in, the host organisms regulatory genes such as genes for inductors, repressors or enzymes, which, owing to their enzymatic activity, engage in the regulation of one or more genes of a biosynthetic pathway. These genes can be of heterologous or homologous origin. Moreover, further biosynthesis genes may advantageously be present, or else these genes may be located on one or more further nucleic acid constructs. Genes, which are advantageously employed as biosynthesis genes are genes of the amino acid metabolism, of glycolysis, of the tricarboxylic acid metabolism or their combinations. As described herein, regulator sequences or factors can have a positive effect on preferably the gene expression of the genes introduced, thus increasing it. Thus, an enhancement of the regulator elements may advantageously take place at the transcriptional level by using strong transcription signals such as promoters and/or enhancers. In addition, however, an enhancement of translation is also possible, for example by increasing mRNA stability or by inserting a translation enhancer sequence.

[0287] In principle, the nucleic acid construct can comprise the herein described regulator sequences and further sequences relevant for the expression of the comprised genes. Thus, the nucleic acid construct of the invention can be used as expression cassette and thus can be used directly for introduction into the plant, or else they may be introduced into a vector. Accordingly in one embodiment the nucleic acid construct is an expression cassette comprising a microorganism promoter or a microorganism terminator or both. In another embodiment the expression cassette encompasses a plant promoter or a plant terminator or both.

[0288] Accordingly, in one embodiment, the process according to the invention comprises the following steps:
[0289] (a) introducing of a nucleic acid construct comprising the nucleic acid molecule of the invention or used in the process of the invention or encoding the polypeptide of the present invention or used in the process of the invention; or
[0290] (b) introducing of a nucleic acid molecule, including regulatory sequences or factors, which expression increases the expression of the nucleic acid molecule of the invention or used in the process of the invention or encoding the polypeptide of the present invention or used in the process of the invention in a cell, or an organism or a part thereof, preferably in a plant, plant cell or a microorganism, and
[0291] (c) expressing of the gene product encoded by the nucleic acid construct or the nucleic acid molecule mentioned under (a) or (b) in the cell or the organism.

[0292] After the introduction and expression of the nucleic acid construct the transgenic organism or cell is advantageously cultured and subsequently harvested. The transgenic organism or cell may be a prokaryotic or eukaryotic organism such as a microorganism, a non-human animal and plant for example a plant or animal cell, a plant or animal tissue, preferably a crop plant, or a part thereof.

[0293] To introduce a nucleic acid molecule into a nucleic acid construct, e.g. as part of an expression cassette, the codogenic gene segment is advantageously subjected to an amplification and ligation reaction in the manner known by a skilled person. It is preferred to follow a procedure similar to the protocol for the Pfu DNA polymerase or a Pfu/Taq DNA polymerase mixture. The primers are selected according to the sequence to be amplified. The primers should expediently be chosen in such a way that the amplificate comprise the codogenic sequence from the start to the stop codon. After the amplification, the amplificate is expediently analyzed. For example, the analysis may consider quality and quantity and be carried out following separation by gel electrophoresis. Thereafter, the amplificate can be purified following a standard protocol (for example Qiagen). An aliquot of the purified amplificate is then available for the subsequent cloning step. The skilled worker generally knows suitable cloning vectors.

[0294] They include, in particular, vectors which are capable of replication in easy to handle cloning systems like as bacterial yeast or insect cell based (e.g. baculovirus expression) systems, that is to say especially vectors which ensure efficient cloning in E. coli, and which make possible the stable transformation of plants. Vectors, which must be mentioned, in particular are various binary and cointegrated vector systems, which are suitable for the T-DNA-mediated transformation. Such vector systems are generally characterized in that they contain at least the vir genes, which are required for the Agrobacterium-mediated transformation, and the T-DNA border sequences.

[0295] In general, vector systems preferably also comprise further cis-regulatory regions such as promoters and terminators and/or selection markers by means of which suitably transformed organisms can be identified. While vir genes and T-DNA sequences are located on the same vector in the case of cointegrated vector systems, binary systems are based on at least two vectors, one of which bears vir genes, but no T-DNA, while a second one bears T-DNA, but no vir gene. Owing to this fact, the last-mentioned vectors are relatively small, easy to manipulate and capable of replication in E. coli and in Agrobacterium. These binary vectors include vectors from the series pBIB-HYG, pPZP, pBecks, pGreen. Those, which are preferably used in accordance with the invention, are Bin19, pBI101, pBinAR, pGPTV and pCAMBIA. An overview of binary vectors and their use is given by Hellens et al, Trends in Plant Science (2000) 5, 446-451.

[0296] For a vector preparation, vectors may first be linearized using restriction endonuclease(s) and then be modified enzymatically in a suitable manner. Thereafter, the vector is purified, and an aliquot is employed in the cloning step. In the cloning step, the enzyme-cleaved and, if required, purified amplificate is cloned together with similarly prepared vector fragments, using ligase. In this context, a specific nucleic acid construct, or vector or plasmid construct, may have one or else more codogenic gene segments. The codogenic gene segments in these constructs are preferably linked operably to regulatory sequences. The regulatory sequences include, in particular, plant sequences like the above-described promoters and terminators. The constructs can advantageously be propagated stably in microorganisms, in particular Escherichia coli and/or Agrobacterium tumefaciens, under selective conditions and enable the transfer of heterologous DNA into plants or other microorganisms. In accordance with a particular embodiment, the constructs are based on binary vectors (overview of a binary vector: Hellens et al., 2000). As a rule, they contain prokaryotic regulatory sequences, such as replication origin and selection markers, for the multiplication in microorganisms such as Escherichia coli and Agrobacterium tumefaciens. Vectors can further contain agrobacterial T-DNA sequences for the transfer of DNA into plant genomes or other eukaryotic regulatory sequences for transfer into other eukaryotic cells, e.g. Saccharomyces sp. or other prokaryotic regulatory sequences for the transfer into other prokaryotic cells, e.g. Corynebacterium sp. or Bacillus sp. For the transformation of plants, the right border sequence, which comprises approximately 25 base pairs, of the total agrobacterial T-DNA sequence is advantageously included. Usually, the plant transformation vector constructs according to the invention contain T-DNA sequences both from the right and from the left border region, which contain expedient recognition sites for site-specific acting enzymes, which, in turn, are encoded by some of the vir genes.

[0297] Suitable host organisms are known to the skilled worker. Advantageous organisms are described further above in the present application. They include in particular eukaryotes or eubacteria, e.g. prokaryotes or archae bacteria. Advantageously host organisms are microorganisms selected from the group consisting of Actinomycetaceae, Bacillaceae, Brevibacteriaceae, Corynebacteriaceae, Enterobacteriacae, Gordoniaceae, Micrococcaceae, Mycobacteriaceae, Nocardiaceae, Pseudomonaceae, Rhizobiaceae, Streptomycetaceae, Chaetomiaceae, Choanephoraceae, Cryptococcaceae, Cunninghamellaceae, Demetiaceae, Moniliaceae, Mortierellaceae, Mucoraceae, Pythiaceae, Saccharomycetaceae, Saprolegniaceae, Schizosaccharomycetaceae, Sodariaceae, Sporobolomycetaceae, Tuberculariaceae, Adelotheciaceae, Dinophyceae, Ditrichaceae and Prasinophyceae. Preferably are unicellular, microorganisms, e.g. fungi, bacteria or protoza, such as fungi like the genus Claviceps or Aspergillus or gram-positive bacteria such as the genera Bacillus, Corynebacterium, Micrococcus, Brevibacterium, Rhodococcus, Nocardia, Caseobacter or Arthrobacter or gram-negative bacteria such as the genera Escherichia, Flavobacterium or Salmonella, or yeasts such as the genera Rhodotorula, Hansenula, Pichia, Yerrowia, Saccharomyces, Schizosaccharomyces or Candida.

[0298] Host organisms which are especially advantageously selected in the process according to the invention are microorganisms selected from the group of the genera and species consisting of Hansenula anomala, Saccharomyces cerevisiae, Candida utilis, Claviceps purpurea, Bacillus circulans, Bacillus subtilis, Bacillus sp., Brevibacterium albidum, Brevibacterium album, Brevibacterium cerinum, Brevibacterium flavum, Brevibacterium glutamigenes, Brevibacterium iodinum, Brevibacterium ketoglutamicum, Brevibacterium lactofermentum, Brevibacterium linens, Brevibacterium roseum, Brevibacterium saccharolyticum, Brevibacterium sp., Corynebacterium acetoacidophilum, Corynebacterium acetoglutamicum, Corynebacterium ammoniagenes, Corynebacterium glutamicum (=Micrococcus glutamicum), Corynebacterium melassecola, Corynebacterium sp. or Escherichia coli, specifically Saccharomyces cerevisiae or Escherichia coli K12 and its described strains.

[0299] Advantageously preferred in accordance with the invention are host organisms of the genus Agrobacterium tumefaciens or plants. Preferred plants are selected from among the families Aceraceae, Anacardiaceae, Apiaceae, Asteraceae, Apiaceae, Betulaceae, Boraginaceae, Brassicaceae, Bromeliaceae, Cactaceae, Caricaceae, Caryophyllaceae, Cannabaceae, Convolvulaceae, Chenopodiaceae, Elaeagnaceae, Geraniaceae, Gramineae, Juglandaceae, Lauraceae, Leguminosae, Linaceae, Cucurbitaceae, Cyperaceae, Euphorbiaceae, Fabaceae, Malvaceae, Nymphaeaceae, Papaveraceae, Rosaceae, Salicaceae, Solanaceae, Arecaceae, Iridaceae, Liliaceae, Orchidaceae, Gentianaceae, Labiaceae, Magnoliaceae, Ranunculaceae, Carifolaceae, Rubiaceae, Scrophulariaceae, Ericaceae, Polygonaceae, Violaceae, Juncaceae, Poaceae, perennial grass, fodder crops, vegetables and ornamentals.

[0300] Especially preferred are plants selected from the groups of the families Apiaceae, Asteraceae, Brassicaceae, Cucurbitaceae, Fabaceae, Papaveraceae, Rosaceae, Solanaceae, Liliaceae or Poaceae. Especially advantageous are, in particular, crop plants. Accordingly, an advantageous plant preferably belongs to the group of the genus peanut, oilseed rape, canola, sunflower, safflower, olive, sesame, hazelnut, almond, avocado, bay, pumpkin/squash, linseed, soya, pistachio, borage, maize, wheat, rye, oats, sorghum and millet, triticale, rice, barley, cassava, potato, sugarbeet, fodder beet, egg plant, and perennial grasses and forage plants, oil palm, vegetables (brassicas, root vegetables, tuber vegetables, pod vegetables, fruiting vegetables, onion vegetables, leafy vegetables and stem vegetables), buckwheat, Jerusalem artichoke, broad bean, vetches, lentil, alfalfa, dwarf bean, lupin, clover and lucerne.

[0301] In order to introduce, into a plant, the nucleic acid molecule of the invention or used in the process according to the invention, it has proved advantageous first to transfer them into an intermediate host, for example a bacterium or a eukaryotic unicellular cell. The transformation into E. coli, which can be carried out in a manner known per se, for example by means of heat shock or electroporation, has proved itself expedient in this context. Thus, the transformed E. coli colonies can be analysed for their cloning efficiency. This can be carried out with the aid of a PCR. Here, not only the identity, but also the integrity, of the plasmid construct can be verified with the aid of a defined colony number by subjecting an aliquot of the colonies to said PCR. As a rule, universal primers which are derived from vector sequences are used for this purpose, it being possible, for example, for a forward primer to be arranged upstream of the start ATG and a reverse primer to be arranged downstream of the stop codon of the codogenic gene segment. The amplificates are separated by electrophoresis and assessed with regard to quantity and quality.

[0302] The nucleic acid constructs, which are optionally verified, are subsequently used for the transformation of the plants or other hosts, e.g. other eukaryotic cells or other prokaryotic cells. To this end, it may first be necessary to obtain the constructs from the intermediate host. For example, the constructs may be obtained as plasmids from bacterial hosts by a method similar to conventional plasmid isolation.

[0303] The nucleic acid molecule of the invention or used in the process according to the invention can also be introduced into modified viral vectors like baculovirus vectors for expression in insect cells or plant viral vectors like tobacco mosaic virus or potato virus X-based vectors. Approaches leading to the expression of proteins from the modified viral genome including the the nucleic acid molecule of the invention or used in the process according to the invention involve for example the inoculation of tobacco plants with infectious RNA transcribed in vitro from a cDNA copy of the recombinant viral genome. Another approach utilizes the transfection of whole plants from wounds inoculated with Agrobacterium tumefaciens containing cDNA copies of recombinant plus-sense RNA viruses. Different vectors and virus are known to the skilled worker for expression in different target eg. production plants.

[0304] A large number of methods for the transformation of plants are known. Since, in accordance with the invention, a stable integration of heterologous DNA into the genome of plants is advantageous, the T-DNA-mediated transformation has proved expedient in particular. For this purpose, it is first necessary to transform suitable vehicles, in particular agrobacteria, with a codogenic gene segment or the corresponding plasmid construct comprising the nucleic acid molecule of the invention. This can be carried out in a manner known per se. For example, said nucleic acid construct of the invention, or said expression construct or said plasmid construct, which has been generated in accordance with what has been detailed above, can be transformed into competent agrobacteria by means of electroporation or heat shock. In principle, one must differentiate between the formation of cointegrated vectors on the one hand and the transformation with binary vectors on the other hand. In the case of the first alternative, the constructs, which comprise the codogenic gene segment or the nucleic acid molecule of the invention have no T-DNA sequences, but the formation of the cointegrated vectors or constructs takes place in the agrobacteria by homologous recombination of the construct with T-DNA. The T-DNA is present in the agrobacteria in the form of Ti or Ri plasmids in which exogenous DNA has expediently replaced the oncogenes. If binary vectors are used, they can be transferred to agrobacteria either by bacterial conjugation or by direct transfer. These agrobacteria expediently already comprise the vector bearing the vir genes (currently referred to as helper Ti(Ri) plasmid).

[0305] One or more markers may expediently also be used together with the nucleic acid construct, or the vector of the invention and, if plants or plant cells shall be transformed together with the T-DNA, with the aid of which the isolation or selection of transformed organisms, such as agrobacteria or transformed plant cells, is possible. These marker genes enable the identification of a successful transfer of the nucleic acid molecules according to the invention via a series of different principles, for example via visual identification with the aid of fluorescence, luminescence or in the wavelength range of light which is discernible for the human eye, by a resistance to herbicides or antibiotics, via what are known as nutritive markers (auxotrophism markers) or antinutritive markers, via enzyme assays or via phytohormones. Examples of such markers which may be mentioned are GFP (=green fluorescent protein); the luciferin/luceferase system, the β-galactosidase with its colored substrates, for example X-Gal, the herbicide resistances to, for example, imidazolinone, glyphosate, phosphinothricin or sulfonylurea, the antibiotic resistances to, for example, bleomycin, hygromycin, streptomycin, kanamycin, tetracyclin, chloramphenicol, ampicillin, gentamycin, geneticin (G418), spectinomycin or blasticidin, to mention only a few, nutritive markers such as the utilization of mannose or xylose, or antinutritive markers such as the resistance to 2-deoxyglucose. This list is a small number of possible markers. The skilled worker is very familiar with such markers. Different markers are preferred, depending on the organism and the selection method.

[0306] As a rule, it is desired that the plant nucleic acid constructs are flanked by T-DNA at one or both sides of the codogenic gene segment. This is particularly useful when bacteria of the species Agrobacterium tumefaciens or Agrobacterium rhizogenes are used for the transformation. A method, which is preferred in accordance with the invention, is the transformation with the aid of Agrobacterium tumefaciens. However, biolistic methods may also be used advantageously for introducing the sequences in the process according to the invention, and the introduction by means of PEG is also possible. The transformed agrobacteria can be grown in the manner known per se and are thus available for the expedient transformation of the plants. The plants or plant parts to be transformed are grown or provided in the customary manner. The transformed agrobacteria are subsequently allowed to act on the plants or plant parts until a sufficient transformation rate is reached. Allowing the agrobacteria to act on the plants or plant parts can take different forms. For example, a culture of morphogenic plant cells or tissue may be used. After the T-DNA transfer, antibiotics as a rule eliminate the bacteria, and the regeneration of plant tissue is induced. This is done in particular using suitable plant hormones in order to initially induce callus formation and then to promote shoot development.

[0307] The transfer of foreign genes into the genome of a plant is called transformation. In doing this the methods described for the transformation and regeneration of plants from plant tissues or plant cells are utilized for transient or stable transformation. An advantageous transformation method is the transformation in planta. To this end, it is possible, for example, to allow the agrobacteria to act on plant seeds or to inoculate the plant meristem with agrobacteria. It has proved particularly expedient in accordance with the invention to allow a suspension of transformed agrobacteria to act on the intact plant or at least the flower primordia. The plant is subsequently grown on until the seeds of the treated plant are obtained (Clough and Bent, Plant J. (1998) 16, 735-743). To select transformed plants, the plant material obtained in the transformation is, as a rule, subjected to selective conditions so that transformed plants can be distinguished from untransformed plants. For example, the seeds obtained in the above-described manner can be planted and, after an initial growing period, subjected to a suitable selection by spraying. A further possibility consists in growing the seeds, if appropriate after sterilization, on agar plates using a suitable selection agent so that only the transformed seeds can grow into plants. Further advantageous transformation methods, in particular for plants, are known to the skilled worker and are described hereinbelow.

[0308] Further advantageous and suitable methods are protoplast transformation by poly (ethylene glycol)-induced DNA uptake, the “biolistic” method using the gene cannon—referred to as the particle bombardment method, electroporation, the incubation of dry embryos in DNA solution, microinjection and gene transfer mediated by Agrobacterium. Said methods are described by way of example in B. Jenes et al., Techniques for Gene Transfer, in: Transgenic Plants, Vol.1, Engineering and Utilization, eds. S. D. Kung and R. Wu, Academic Press (1993) 128-143 and in Potrykus Annu. Rev. Plant Physiol. Plant Molec. Biol. 42 (1991) 205-225). The nucleic acids or the construct to be expressed is preferably cloned into a vector, which is suitable for transforming Agrobacterium tumefaciens, for example pBin19 (Bevan et al., Nucl. Acids Res. 12 (1984) 8711). Agrobacteria transformed by such a vector can then be used in known manner for the transformation of plants, in particular of crop plants such as by way of example tobacco plants, for example by bathing bruised leaves or chopped leaves in an agrobacterial solution and then culturing them in suitable media. The transformation of plants by means of Agrobacterium tumefaciens is described, for example, by Höfgen and Willmitzer in Nucl. Acid Res. (1988) 16, 9877 or is known inter alia from F. F. White, Vectors for Gene Transfer in Higher Plants; in Transgenic Plants, Vol. 1, Engineering and Utilization, eds. S. D. Kung and R. Wu, Academic Press, 1993, pp. 15-38.

[0309] The abovementioned nucleic acid molecules can be cloned into the nucleic acid constructs or vectors according to the invention in combination together with further genes, or else different genes are introduced by transforming several nucleic acid constructs or vectors (including plasmids) into a host cell, advantageously into a plant cell or a microorgansims.

[0310] In addition to the sequence mentioned in SEQ ID NO: 1, 3, 5, 7, 9, 11, 13, 15, 17, 19, 21, 23, 25, 27, 29, 31, 33, 35, 37, 39, 41, 43, 45, 55, 57, 59, 61, 63, 65, 67, 69, 71, 73, 75, 77, 79, 81, 83, 85, 87, 89, 91, 93, 95, 97, 99, 101, 103, 105, 107, 109, 111, 113, 115, 117, 119, 121, 123, 125, 127, 129, 131, 133, 135, 137, 139, 141, 143, 145, 147, 149, 151, 153, 155, 157, 159, 161, 163, 165, 167, 169, 171, 173, 175, 177, 179, 181, 183, 185, 187, 189, 191, 193, 195, 197, 199, 201, 203, 205, 207, 209, 211, 213, 215, 217, 219, 221, 223, 225, 227, 229, 231, 233, 235, 237, 239, 241, 243, 245, 247, 249, 251, 253, 255, 257, 259, 261, 263, 265, 267, 269, 271, 273, 275, 277, 279, 281, 283, 285, 287, 289, 291, 293, 295, 297, 299, 301, 303, 305, 307, 309, 311, 313, 315, 317, 319, 321, 323, 325, 327, 329, 331, 333, 335, 337, 339, 341, 343, 345, 347, 349, 351, 353, 355, 357, 359, 361, 363, 365, 367, 369, 371, 373, 375, 377, 379, 381, 383, 385, 387, 389, 391 or 393 or its derivatives, it is advantageous additionally to express and/or mutate further genes in the organisms. Especially advantageously, additionally at least one further gene of the fine chemical biosynthetic pathway e.g. the amino acid biosynthetic pathway such as for L-tryptophane, L-isoleucine, L-leucine, L-lysine, L-threonine and/or L-methionine to mention only a couple of them is expressed in the organisms such as plants or microorganisms. It is also possible that the regulation of the natural genes has been modified advantageously so that the gene and/or its gene product is no longer subject to the regulatory mechanisms which exist in the organisms. This leads to an increased synthesis of the fine chemicals e.g. the amino acids desired since, for example, feedback regulations no longer exist to the same extent or not at all. In addition it might be advantageously to combine the sequences shown in SEQ ID NO: 1, 3, 5, 7, 9, 11, 13, 15, 17, 19, 21, 23, 25, 27, 29, 31, 33, 35, 37, 39, 41, 43, 45, 55, 57, 59, 61, 63, 65, 67, 69, 71, 73, 75, 77, 79, 81, 83, 85, 87, 89, 91, 93, 95, 97, 99, 101, 103, 105, 107, 109, 111, 113, 115, 117, 119, 121, 123, 125, 127, 129, 131, 133, 135, 137, 139, 141, 143, 145, 147, 149, 151, 153, 155, 157, 159, 161, 163, 165, 167, 169, 171, 173, 175, 177, 179, 181, 183, 185, 187, 189, 191, 193, 195, 197, 199, 201, 203, 205, 207, 209, 211, 213, 215, 217, 219, 221, 223, 225, 227, 229, 231, 233, 235, 237, 239, 241, 243, 245, 247, 249, 251, 253, 255, 257, 259, 261, 263, 265, 267, 269, 271, 273, 275, 277, 279, 281, 283, 285, 287, 289, 291, 293, 295, 297, 299, 301, 303, 305, 307, 309, 311, 313, 315, 317, 319, 321, 323, 325, 327, 329, 331, 333, 335, 337, 339, 341, 343, 345, 347, 349, 351, 353, 355, 357, 359, 361, 363, 365, 367, 369, 371, 373, 375, 377, 379, 381, 383, 385, 387, 389, 391 or 393 with genes which generally support or enhances to growth or yield of the target organismen, for example genes which lead to faster growth rate of microorganisms or genes which produces stress-, pathogen, or herbicide resistant plants.

[0311] In a further embodiment of the process of the invention, therefore, organisms are grown, in which there is simultaneous overexpression of at least one nucleic acid or one of the genes which code for proteins involved in the fine chemical metabolism e.g. the amino acid metabolism, in particular in amino acid synthesis.

[0312] A further advantageous nucleic acid sequence which can be expressed in combination with the sequences used in the process and/or the abovementioned biosynthesis genes is the sequence of the ATP/ADP translocator as described in WO 01/20009. This ATP/ADP translocator leads to an increased synthesis of the essential amino acids lysine and/or methionine. Furthermore, an advantageous nucleic acid sequence coexpressed can be threonine adlolase and/or lysine decarboxylase as described in the state of the art.

[0313] In a further advantageous embodiment of the process of the invention, the organisms used in the process are those in which simultaneously at least one of the aforementioned genes or one of the aforementioned nucleic acids is mutated so that the activity of the corresponding proteins is influenced by metabolites to a smaller extent compared with the unmutated proteins, or not at all, and that in particular the production according to the invention of the fine chemical for example of the amino acids is not impaired, or so that their specific enzymatic activity is increased. Less influence means in this connection that the regulation of the enzymic activity is less by at least 10%, advantageously at least 20, 30 or 40%, particularly advantageously by at least 50, 60 or 70%, compared with the starting organism, and thus the activity of the enzyme is increased by these figures mentioned compared with the starting organism. An increase in the enzymatic activity means an enzymatic activity which is increased by at least 10%, advantageously at least 20, 30 or 40%, particularly advantageously by at least 50, 60 or 70%, compared with the starting organism. This leads to an increased productivity of the fine chemical.

[0314] In a further advantageous embodiment of the process of the invention, the organisms used in the process are those in which simultaneously the fine chemical degrading protein is attenuated, in particular by reducing the rate of expression of the corresponding gene.

[0315] In another embodiment of the process of the invention, the organisms used in the process are those in which simultaneously at least one of the aforementioned nucleic acids or of the aforementioned genes is mutated in such a way that the enzymatic activity of the corresponding protein is partially reduced or completely blocked. A reduction in the enzymatic activity means an enzymatic activity, which is reduced by at least 10%, advantageously at least 20, 30 or 40%, particularly advantageously by at least 50, 60 or 70%, preferably more, compared with the starting organism.

[0316] If it is intended to transform the host cell, in particular the plant cell, with several constructs or vectors, the marker of a preceding transformation must be removed or a further marker employed in a following transformation. The markers can be removed from the host cell, in particular the plant cell, as described hereinbelow via methods with which the skilled worker is familiar. In particular plants without a marker, in particular without resistance to antibiotics, are an especially preferred embodiment of the present invention.

[0317] In the process according to the invention, the nucleic acid sequences used in the process according to the invention are advantageously linked operably to one or more regulatory signals in order to increase gene expression. These regulatory sequences are intended to enable the specific expression of the genes and the expression of protein. Depending on the host organism for example plant or microorganism, this may mean, for example, that the gene is expressed and/or overexpressed after induction only, or that it is expressed and/or overexpressed constitutively. These regulatory sequences are, for example, sequences to which the inductors or repressors bind and which thus regulate the expression of the nucleic acid. In addition to these novel regulatory sequences, or instead of these sequences, the natural regulation of these sequences may still be present before the actual structural genes and, if appropriate, may have been genetically modified so that the natural regulation has been switched off and gene expression has been increased. However, the nucleic acid construct of the invention suitable as expression cassette (=expression construct=gene construct) can also be simpler in construction, that is to say no additional regulatory signals have been inserted before the nucleic acid sequence or its derivatives, and the natural promoter together with its regulation has not been removed. Instead, the natural regulatory sequence has been mutated in such a way that regulation no longer takes place and/or gene expression is increased. These modified promoters can also be introduced on their own before the natural gene in the form of part sequences (=promoter with parts of the nucleic acid sequences according to the invention) in order to increase the activity. Moreover, the gene construct can advantageously also comprise one or more of what are known as enhancer sequences in operable linkage with the promoter, and these enable an increased expression of the nucleic acid sequence. Also, it is possible to insert additional advantageous sequences at the 3′ end of the DNA sequences, such as, for example, further regulatory elements or terminators.

[0318] The nucleic acid molecules, which encode proteins according to the invention and nucleic acid molecules, which encode other polypeptides may be present in one nucleic acid construct or vector or in several ones. Advantageously, only one copy of the nucleic acid molecule of the invention or its encoding genes is present in the nucleic acid construct or vector. Several vectors or nucleic acid construct or vector can be expressed together in the host organism. The nucleic acid molecule or the nucleic acid construct or vector according to the invention can be inserted in a vector and be present in the cell in a free form. If a stable transformation is preferred, a vector is used, which is stably duplicated over several generations or which is else be inserted into the genome. In the case of plants, integration into the plastid genome or, in particular, into the nuclear genome may have taken place. For the insertion of more than one gene in the host genome the genes to be expressed are present together in one gene construct, for example in above-described vectors bearing a plurality of genes.

[0319] As a rule, regulatory sequences for the expression rate of a gene are located upstream (5′), within, and/or downstream (3′) relative to to the coding sequence of the nucleic acid molecule of the invention or another codogenic gene segment. They control in particular transcription and/or translation and/or the transcript stability. The expression level is dependent on the conjunction of further cellular regulatory systems, such as the protein biosynthesis and degradation systems of the cell.

[0320] Regulatory sequences include transcription and translation regulating sequences or signals, e.g. sequences located upstream (5′), which concern in particular the regulation of transcription or translation initiation, such as promoters or start codons, and sequences located downstream (3′), which concern in particular the regulation of transcription or translation termination and transcript stability, such as polyadenylation signals or stop codons. Regulatory sequences can also be present in transcribed coding regions as well in transcribed non-coding regions, e.g. in introns, as for example splicing sites. Promoters for the regulation of expression of the nucleic acid molecule according to the invention in a cell and which can be employed are, in principle, all those which are capable of stimulating the transcription of genes in the organisms in question, such as microorganisms or plants. Suitable promoters, which are functional in these organisms, are generally known. They may take the form of constitutive or inducible promoters. Suitable promoters can enable the development- and/or tissue-specific expression in multi-celled eukaryotes; thus, leaf-, root-, flower-, seed-, stomata-, tuber- or fruit-specific promoters may advantageously be used in plants.

[0321] The regulatory sequences or factors can, as described above, have a positive effect on, the expression of the genes introduced, thus increasing their expression. Thus, an enhancement of the expression can advantageously take place at the transcriptional level by using strong transcription signals such as strong promoters and/or strong enhancers. In addition, enhancement of expression on the translational level is also possible, for example by introducing translation enhancer sequences, e.g., the Ω enhancer e.g. improving the ribosomal binding to the transcript, or by increasing the stability of the mRNA, e.g. by replacing the 3′UTR coding region by a region encoding a 3′UTR known as conferring an high stability of the transcript or by stabilization of the transcript through the elimination of transcript instability, so that the mRNA molecule is translated more often than the wild type. For example in plants AU-rich elements (AREs) and DST (downstream) elements destabilized transcripts. Mutagenesis studies have demonstrated that residues within two of the conserved domains, the ATAGAT and the GTA regions, are necessary for instability function. Therefore removal or mutation of such elements would obviously lead to more stable transcripts, higher transcript rates and higher protein acitivity. Translation enhancers are also the “overdrive sequence”, which comprises the tobacco mosaic virus 5′-untranslated leader sequence and which increases the protein/RNA ratio (Gallie et al., 1987, Nucl. Acids Research 15:8693-8711)

[0322] Enhancers are generally defined as cis active elements, which can stimulate gene transcription independent of position and orientation. Different enhancers have been identified in plants, which can either stimulate transcription constitutively or tissue or stimuli specific. Well known examples for constitutive enhancers are the enhancer from the 35S promoter (Odell et al., 1985, Nature 313:810-812) or the ocs enhancer (Fromm et al., 1989, Plant Cell 1: 977:984) Another examples are the G-Box motif tetramer which confers high-level constitutive expression in dicot and monocot plants (Ishige et al., 1999, Plant Journal, 18, 443-448) or the petE, a A/T-rich sequence which act as quantitative enhancers of gene expression in transgenic tobacco and potato plants (Sandhu et al., 1998; Plant Mol Biol. 37(5):885-96). Beside that, a large variety of cis-active elements have been described which contribute to specific expression pattern, like organ specific expression or induced expression in response to biotic or abiotic stress. Examples are elements, which provide pathogen or wound-induced expression (Rushton, 2002, Plant Cell, 14, 749-762) or guard cell-specific expression (Plesch, 2001, Plant Journal 28, 455-464).

[0323] Advantageous regulatory sequences for the expression of the nucleic acid molecule according to the invention in microorganisms are present for example in promoters such as the cos, tac, rha, trp, tet, trp-tet, lpp, lac, lpp-lac, lacl^{q-}, T7, T5, T3, gal, trc, ara, SP6, λ-P_{R} or λ-P_{L} promoter, which are advantageously used in Gram-negative bacteria. Further advantageous regulatory sequences are present for example in the Gram-positive promoters amy, dnak, xylS and SPO2, in the yeast or fungal promoters ADC1, MFα, AC, P-60, UASH, MCB, PHO, CYC1, GAPDH, TEF, rp28, ADH. Promoters, which are particularly advantageous, are constitutive, tissue or compartment specific and inducible promoters. In general, “promoter” is understood as meaning, in the present context, a regulatory sequence in a nucleic acid molecule, which mediates the expression of a coding sequence segment of a nucleic acid molecule. In general, the promoter is located upstream to the coding sequence segment. Some elements, for example expression-enhancing elements such as enhancer may, however, also be located downstream or even in the transcribed region.

[0324] In principle, it is possible to use natural promoters together with their regulatory sequences, such as those mentioned above, for the novel process. It is also possible advantageously to use synthetic promoters, either additionally or alone, in particular when they mediate seed-specific expression such as described in, for example, WO 99/16890.

[0325] The expression of the nucleic acid molecules used in the process may be desired alone or in combination with other genes or nucleic acids. Multiple nucleic acid molecules conferring the expression of advantageous genes can be introduced via the simultaneous transformation of several individual suitable nucleic acid constructs, i.e. expression constructs, or, preferably, by combining several expression cassettes on one construct. It is also possible to transform several vectors with in each case several expression cassettes stepwise into the recipient organisms.

[0326] As described above, the transcription of the genes introduced should advantageously be terminated by suitable terminators at the 3′ end of the biosynthesis genes introduced (behind the stop codon). A terminator, which may be used for this purpose is, for example, the OCS1 terminator, the nos3 terminator or the 35S terminator. As is the case with the promoters, different terminator sequences should be used for each gene. Terminators, which are useful in microorganism, are for example the fimA terminator, txn terminator or trp terminator. Such terminators can be rho-dependent or rho-independent.

[0327] Different plant promoters such as, for example, the USP, the LegB4-, the DC3 promoter or the ubiquitin promoter from parsley or other herein mentioned promoter and different terminators may advantageously be used in the nucleic acid construct.

[0328] In order to ensure the stable integration, into the transgenic plant, of nucleic acid molecules used in the process according to the invention in combination with further biosynthesis genes over a plurality of generations, each of the coding regions used in the process should be expressed under the control of its own, preferably unique, promoter since repeating sequence motifs may lead to recombination events or to silencing or, in plants, to instability of the T-DNA.

[0329] The nucleic acid construct is advantageously constructed in such a way that a promoter is followed by a suitable cleavage site for insertion of the nucleic acid to be expressed, advantageously in a polylinker, followed, if appropriate, by a terminator located behind the polylinker. If appropriate, this order is repeated several times so that several genes are combined in one construct and thus can be introduced into the transgenic plant in order to be expressed. The sequence is advantageously repeated up to three times. For the expression, the nucleic acid sequences are inserted via the suitable cleavage site, for example in the polylinker behind the promoter. It is advantageous for each nucleic acid sequence to have its own promoter and, if appropriate, its own terminator, as mentioned above. However, it is also possible to insert several nucleic acid sequences behind a promoter and, if appropriate, before a terminator if a polycistronic transcription is possible in the host or target cells. In this context, the insertion site, or the sequence of the nucleic acid molecules inserted, in the nucleic acid construct is not decisive, that is to say a nucleic acid molecule can be inserted in the first or last position in the cassette without this having a substantial effect on the expression. However, it is also possible to use only one promoter type in the construct. However, this may lead to undesired recombination events or silencing effects, as said.

[0330] Accordingly, in a preferred embodiment, the nucleic acid construct according to the invention confers expression of the nucleic acid molecule of the invention, and, optionally further genes, in a plant and comprises one or more plant regulatory elements. Said nucleic acid construct according to the invention advantageously encompasses a plant promoter or a plant terminator or a plant promoter and a plant terminator.

[0331] A “plant” promoter comprises regulatory elements, which mediate the expression of a coding sequence segment in plant cells. Accordingly, a plant promoter need not be of plant origin, but may originate from viruses or microorganisms, in particular for example from viruses which attack plant cells.

[0332] The plant promoter can also originates from a plant cell, e.g. from the plant, which is transformed with the nucleic acid construct or vector as described herein. This also applies to other “plant” regulatory signals, for example in “plant” terminators.

[0333] A nucleic acid construct suitable for plant expression preferably comprises regulatory elements which are capable of controlling the expression of genes in plant cells and which are operably linked so that each sequence can fulfill its function. Accordingly, the nucleic acid construct can also comprise transcription terminators. Examples for transcriptional termination are polyadenylation signals. Preferred polyadenylation signals are those which originate from Agrobacterium tumefaciens T-DNA, such as the gene 3 of the Ti plasmid pTiACH5, which is known as octopine synthase (Gielen et al., EMBO J. 3 (1984) 835 et seq.) or functional equivalents thereof, but all the other terminators which are functionally active in plants are also suitable.

[0334] The nucleic acid construct suitable for plant expression preferably also comprises other operably linked regulatory elements such as translation enhancers, for example the overdrive sequence, which comprises the tobacco mosaic virus 5′-untranslated leader sequence, which increases the protein/RNA ratio (Gallie et al., 1987, Nucl. Acids Research 15:8693-8711).

[0335] Other preferred sequences for use in operable linkage in gene expression constructs are targeting sequences, which are required for targeting the gene product into specific cell compartments (for a review, see Kermode, Crit. Rev. Plant Sci. 15, 4 (1996) 285-423 and references cited therein), for example into the vacuole, the nucleus, all types of plastids, such as amyloplasts, chloroplasts, chromoplasts, the extracellular space, the mitochondria, the endoplasmic reticulum, elaioplasts, peroxisomes, glycosomes, and other compartments of cells or extracellular. Sequences, which must be mentioned in this context are, in particular, the signal-peptide- or transit-peptide-encoding sequences which are known per se. For example, plastid-transit-peptide-encoding sequences enable the targeting of the expression product into the plastids of a plant cell. Targeting sequences are also known for eukaryotic and to a lower extent for prokaryotic organisms and can advantageously be operable linked with the nucleic acid molecule of the present invention to achieve an expression in one of said compartments or extracellular.

[0336] For expression in plants, the nucleic acid molecule must, as described above, be linked operably to or comprise a suitable promoter which expresses the gene at the right point in time and in a cell- or tissue-specific manner. Usable promoters are constitutive promoters (Benfey et al., EMBO J. 8 (1989) 2195-2202), such as those which originate from plant viruses, such as 35S CAMV (Franck et al., Cell 21 (1980) 285-294), 19S CaMV (see also U.S. Pat. No. 5,352,605 and WO 84/02913), 34S FMV (Sanger et al., Plant. Mol. Biol., 14, 1990: 433-443), the parsley ubiquitin promoter, or plant promoters such as the Rubisco small subunit promoter described in U.S. Pat. No. 4,962,028 or the plant promoters PRP1 [Ward et al., Plant. Mol. Biol. 22 (1993)], SSU, PGEL1, OCS [Leisner (1988) Proc Natl Acad Sci USA 85(5): 2553-2557], lib4, usp, mas [Comai (1990) Plant Mol Biol 15 (3):373-381], STLS1, ScBV (Schenk (1999) Plant Mol Biol 39(6):1221-1230), B33, SAD1 or SAD2 (flax promoters, Jain et al., Crop Science, 39 (6), 1999: 1696-1701) or nos [Shaw et al. (1984) Nucleic Acids Res. 12(20):7831-7846]. Stable, constitutive expression of the proteins according to the invention a plant can be advantageous. However, inducible expression of the polypeptide of the invention is advantageous, if a late expression before the harvest is of advantage, as metabolic manipulation may lead to a plant growth retardation.

[0337] The expression of plant genes can also be facilitated as described above via a chemical inducible promoter (for a review, see Gatz 1997, Annu. Rev. Plant Physiol. Plant Mol. Biol., 48:89-108). Chemically inducible promoters are particularly suitable when it is desired to express the gene in a time-specific manner. Examples of such promoters are a salicylic acid inducible promoter (WO 95/19443), and abscisic acid-inducible promoter (EP 335 528), a tetracyclin-inducible promoter (Gatz et al. (1992) Plant J. 2, 397-404), a cyclohexanol- or ethanol-inducible promoter (WO 93/21334) or others as described herein.

[0338] Other suitable promoters are those which react to biotic or abiotic stress conditions, for example the pathogen-induced PRP1 gene promoter (Ward et al., Plant. Mol. Biol. 22 (1993) 361-366), the tomato heat-inducible hsp80 promoter (U.S. Pat. No. 5,187,267), the potato chill-inducible alpha-amylase promoter (WO 96/12814) or the wound-inducible pinII promoter (EP-A-0 375 091) or others as described herein.

[0339] Preferred promoters are in particular those which bring about gene expression in tissues and organs in which the biosynthesis of fine chemical takes place, in seed cells, such as endosperm cells and cells of the developing embryo. Suitable promoters are the oilseed rape napin gene promoter (U.S. Pat. No. 5,608,152), the Vicia faba USP promoter (Baeumlein et al., Mol Gen Genet, 1991, 225 (3):459-67), the Arabidopsis oleosin promoter (WO 98/45461), the Phaseolus vulgaris phaseolin promoter (U.S. Pat. No. 5,504,200), the Brassica Bce4 promoter (WO 91/13980), the bean arc5 promoter, the carrot DcG3 promoter, or the Legumin B4 promoter (LeB4; Baeumlein et al., 1992, Plant Journal, 2 (2):233-9), and promoters which bring about the seed-specific expression in monocotyledonous plants such as maize, barley, wheat, rye, rice and the like. Advantageous seed-specific promoters are the sucrose binding protein promoter (WO 00/26388), the phaseolin promoter and the napin promoter. Suitable promoters which must be considered are the barley lpt2 or lpt1 gene promoter (WO 95/15389 and WO 95/23230), and the promoters described in WO 99/16890 (promoters from the barley hordein gene, the rice glutelin gene, the rice oryzin gene, the rice prolamin gene, the wheat gliadin gene, the wheat glutelin gene, the maize zein gene, the oat glutelin gene, the sorghum kasirin gene and the rye secalin gene). Further suitable promoters are Amy32b, Amy 6-6 and Aleurain [U.S. Pat. No. 5,677,474], Bce4 (oilseed rape) [U.S. Pat. No. 5,530,149], glycinin (soya) [EP 571 741], phosphoenolpyruvate carboxylase (soya) [JP 06/62870], ADR12-2 (soya) [WO 98/08962], isocitrate lyase (oilseed rape) [U.S. Pat. No. 5,689,040] or α-amylase (barley) [EP 781 849]. Other promoters which are available for the expression of genes in plants are leaf-specific promoters such as those described in DE-A 19644478 or light-regulated promoters such as, for example, the pea petE promoter.

[0340] Further suitable plant promoters are the cytosolic FBPase promoter or the potato ST-LSI promoter (Stockhaus et al., EMBO J. 8, 1989, 2445), the Glycine max phosphoribosylpyrophosphate amidotransferase promoter (GenBank Accession No. U87999) or the node-specific promoter described in EP-A-0 249 676.

[0341] Other promoters, which are particularly suitable, are those, which bring about plastid-specific expression. Suitable promoters such as the viral RNA polymerase promoter are described in WO 95/16783 and WO 97/06250, and the Arabidopsis clpP promoter, which is described in WO 99/46394.

[0342] Other promoters, which are used for the strong expression of heterologous sequences in as many tissues as possible, in particular also in leaves, are, in addition to several of the abovementioned viral and bacterial promoters, preferably, plant promoters of actin or ubiquitin genes such as, for example, the rice actin1 promoter. Further examples of constitutive plant promoters are the sugarbeet V-ATPase promoters (WO 01/14572). Examples of synthetic constitutive promoters are the Super promoter (WO 95/14098) and promoters derived from G-boxes (WO 94/12015). If appropriate, chemical inducible promoters may furthermore also be used, compare EP-A 388186, EP-A 335528, WO 97/06268.

[0343] As already mentioned herein, further regulatory sequences, which may be expedient, if appropriate, also include sequences, which target the transport and/or the localization of the expression products. Sequences, which must be mentioned in this context are, in particular, the signal-peptide- or transit-peptide-encoding sequences which are known per se. For example, plastid-transit-peptide-encoding sequences enable the targeting of the expression product into the plastids of a plant cell.

[0344] Preferred recipient plants are, as described above, in particular those plants, which can be transformed in a suitable manner. These include monocotyledonous and dicotyledonous plants. Plants which must be mentioned in particular are agriculturally useful plants such as cereals and grasses, for example Triticum spp., Zea mays, Hordeum vulgare, oats, Secale cereale, Oryza sativa, Pennisetum glaucum, Sorghum bicolor, Triticale, Agrostis spp., Cenchrus ciliaris, Dactylis glomerata, Festuca arundinacea, Lolium spp., Medicago spp. and Saccharum spp., legumes and oil crops, for example Brassica juncea, Brassica napus, Glycine max, Arachis hypogaea, Gossypium hirsutum, Cicer arietinum, Helianthus annuus, Lens culinaris, Linum usitatissimum, Sinapis alba, Trifolium repens and Vicia narbonensis, vegetables and fruits, for example bananas, grapes, Lycopersicon esculentum, asparagus, cabbage, watermelons, kiwi fruit, Solanum tuberosum, Beta vulgaris, cassava and chicory, trees, for example Coffea species, Citrus spp., Eucalyptus spp., Picea spp., Pinus spp. and Populus spp., medicinal plants and trees, and flowers.

[0345] One embodiment of the present invention also relates to a method for generating a vector, which comprises the insertion, into a vector, of the nucleic acid molecule characterized herein, the nucleic acid molecule according to the invention or the expression cassette according to the invention. The vector can, for example, be introduced in to a cell, e.g. a microorganism or a plant cell, as described herein for the nucleic acid construct, or below under transformation or transfection or shown in the examples. A transient or stable transformation of the host or target cell is possible, however, a stable transformation is preferred. The vector according to the invention is preferably a vector, which is suitable for expressing the polypeptide according to the invention in a plant. The method can thus also encompass one or more steps for integrating regulatory signals into the vector, in particular signals, which mediate the expression in microorganisms or plants.

[0346] Accordingly, the present invention also relates to a vector comprising the nucleic acid molecule characterized herein as part of a nucleic acid construct suitable for plant expression or the nucleic acid molecule according to the invention.

[0347] The advantageous vectors of the invention comprise the nucleic acid molecules which encode proteins according to the invention, nucleic acid molecules which are used in the process, or nucleic acid construct suitable for plant expression comprising the nucleic acid molecules used, either alone or in combination with further genes such as the biosynthesis or regulatory genes of the fine chemical metabolism e.g. with the genes mentioned herein above. In accordance with the invention, the term “vector” refers to a nucleic acid molecule, which is capable of transporting another nucleic acid to which it is linked. One type of vector is a “plasmid”, which means a circular double-stranded DNA loop into which additional DNA segments can be ligated. A further type of vector is a viral vector, it being possible to ligate additional nucleic acids segments into the viral genome. Certain vectors are capable of autonomous replication in a host cell into which they have been introduced (for example bacterial vectors with bacterial replication origin). Other preferred vectors are advantageously completely or partly integrated into the genome of a host cell when they are introduced into the host cell and thus replicate together with the host genome. Moreover, certain vectors are capable of controlling the expression of genes with which they are in operable linkage. In the present context, these vectors are referred to as “expression vectors”. As mentioned above, they are capable of autonomous replication or may be integrated partly or completely into the host genome. Expression vectors, which are suitable for DNA recombination techniques usually, take the form of plasmids. In the present description, “plasmid” and “vector” can be used interchangeably since the plasmid is the most frequently used form of a vector. However, the invention is also intended to encompass these other forms of expression vectors, such as viral vectors, which exert similar functions. The term vector is furthermore also to encompass other vectors which are known to the skilled worker, such as phages, viruses such as SV40, CMV, TMV, transposons, IS elements, phasmids, phagemids, cosmids, and linear or circular DNA.

[0348] The recombinant expression vectors which are advantageously used in the process comprise the nucleic acid molecules according to the invention or the nucleic acid construct according to the invention in a form which is suitable for expressing, in a host cell, the nucleic acid molecules according to the invention or described herein. Accordingly, the the recombinant expression vectors comprise one or more regulatory signals selected on the basis of the host cells to be used for the expression, in operable linkage with the nucleic acid sequence to be expressed.

[0349] In a recombinant expression vector, “operable linkage” means that the nucleic acid molecule of interest is linked to the regulatory signals in such a way that expression of the nucleic acid molecule is possible: they are linked to one another in such a way that the two sequences fulfill the predicted function assigned to the sequence (for example in an in-vitro transcription/translation system, or in a host cell if the vector is introduced into the host cell).

[0350] The term “regulatory sequence” is intended to comprise promoters, enhancers and other expression control elements (for example polyadenylation signals. These regulatory sequences are described, for example, in Goeddel: Gene Expression Technology: Methods in Enzymology 185, Academic Press, San Diego, Calif. (1990), or see: Gruber and Crosby, in: Methods in Plant Molecular Biology and Biotechnolgy, CRC Press, Boca Raton, Fla., Ed.: Glick and Thompson, chapter 7, 89-108, including the references cited therein. Regulatory sequences encompass those, which control the constitutive expression of a nucleotide sequence in many types of host cells and those which control the direct expression of the nucleotide sequence in specific host cells only, and under specific conditions. The skilled worker knows that the design of the expression vector may depend on factors such as the selection of the host cell to be transformed, the extent to which the desired protein is expressed, and the like. A preferred selection of regulatory sequences is described above, for example promoters, terminators, enhancers and the like. The term regulatory sequence is to be considered as being encompassed by the term regulatory signal. Several advantageous regulatory sequences, in particular promoters and terminators are described above. In general, the regulatory sequences described as advantageous for nucleic acid construct suitable for expression are also applicable for vectors.

[0351] The recombinant expression vectors used can be designed specifically for the expression, in prokaryotic and/or eukaryotic cells, of nucleic acid molecules used in the process. This is advantageous since intermediate steps of the vector construction are frequently carried out in microorganisms for the sake of simplicity. For example, the genes according to the invention and other genes can be expressed in bacterial cells, insect cells (using baculovirus expression vectors), yeast cells and other fungal cells [Romanos (1992), Yeast 8:423-488; van den Hondel, (1991), in: More Gene Manipulations in Fungi, J. W. Bennet & L. L. Lasure, Ed., pp. 396-428: Academic Press: San Diego; and van den Hondel, C. A. M. J. J. (1991), in: Applied Molecular Genetics of Fungi, Peberdy, J. F., et al., Ed., pp. 1-28, Cambridge University Press: Cambridge], algae [Falciatore et al., 1999, Marine Biotechnology. 1, 3:239-251] using vectors and following a transformation method as described in WO 98/01572, and preferably in cells of multi-celled plants [see Schmidt, R. and Willmitzer, L. (1988) Plant Cell Rep.: 583-586; Plant Molecular Biology and Biotechnology, C Press, Boca Raton, Fla., chapter 6/7, pp. 71-119 (1993); F. F. White, in: Transgenic Plants, Bd. 1, Engineering and Utilization, Ed.: Kung and R. Wu, Academic Press (1993), 128-43; Potrykus, Annu. Rev. Plant Physiol. Plant Molec. Biol. 42 (1991), 205-225 (and references cited therein)]. Suitable host cells are furthermore discussed in Goeddel, Gene Expression Technology: Methods in Enzymology 185, Academic Press, San Diego, Calif. (1990). As an alternative, the sequence of the recombinant expression vector can be transcribed and translated in vitro, for example using T7 promotor-regulatory sequences and T7 polymerase.

[0352] Proteins can be expressed in prokaryotes using vectors comprising constitutive or inducible promoters, which control the expression of fusion proteins or nonfusion proteins. Typical fusion expression vectors are, inter alia, pGEX (Pharmacia Biotech Inc; Smith, D. B., and Johnson, K. S. (1988) Gene 67:31-40), pMAL (New England Biolabs, Beverly, Mass.) and pRIT5 (Pharmacia, Piscataway, N.J.), in which glutathione-S-transferase (GST), maltose-E-binding protein or protein A is fused with the recombinant target protein. Examples of suitable inducible nonfusion E. coli expression vectors are, inter alia, pTrc (Amann et al. (1988) Gene 69:301-315) and pET 11d [Studier et al., Gene Expression Technology: Methods in Enzymology 185, Academic Press, San Diego, Calif. (1990) 60-89]. The target gene expression of the pTrc vector is based on the transcription of a hybrid trp-lac fusion promoter by the host RNA polymerase. The target gene expression from the pET 11d vector is based on the transcription of a T7-gn10-lac fusion promoter, which is mediated by a coexpressed viral RNA polymerase (T7 gn1). This viral polymerase is provided by the host strains BL21 (DE3) or HMS174 (DE3) by a resident λ-prophage, which harbors a T7 gn1 gene under the transcriptional control of the lacUV 5 promoter.

[0353] Other vectors which are suitable in prokaryotic organisms are known to the skilled worker; these vectors are for example in E. coli pLG338, pACYC184, the pBR series, such as pBR322, the pUC series such as pUC18 or pUC19, the M113mp series, pKC30, pRep4, pHS1, pHS2, pPLc236, pMBL24, pLG200, pUR290, pIN-III¹¹³-B1, λgt11 or pBdCl, in Streptomyces pIJ101, pIJ364, pIJ702 or pIJ361, in Bacillus pUB 110, pC194 or pBD214, in Corynebacterium pSA77 or pAJ667.

[0354] In a further embodiment, the expression vector is a yeast expression vector. Examples of vectors for expression in the yeasts S. cerevisiae encompass pYeDesaturasec1 (Baldari et al. (1987) Embo J. 6:229-234), pMFa (Kurjan and Herskowitz (1982) Cell 30:933-943), pJRY88 (Schultz et al. (1987) Gene 54:113-123) and pYES2 (Invitrogen Corporation, San Diego, Calif.). Vectors and methods for the construction of vectors which are suitable for use in other fungi, such as the filamentous fungi, encompass those which are described in detail in: van den Hondel, C. A. M. J. J. [(1991), J. F. Peberdy, Ed., pp. 1-28, Cambridge University Press: Cambridge; or in: More Gene Manipulations in Fungi; J. W. Bennet & L. L. Lasure, Ed., pp. 396-428: Academic Press: San Diego]. Examples of other suitable yeast vectors are 20□M, pAG-1, YEp6, YEp13 or pEMBLYe23.

[0355] Further vectors, which may be mentioned by way of example, are pALS1, pIL2 or pBB116 in fungi or pLGV23, pGHlac⁺, pBIN19, pAK2004 or pDH51 in plants.

[0356] As an alternative, the nucleic acid sequences can be expressed in insect cells using baculovirus expression vectors. Baculovirus vectors which are available for expressing proteins in cultured insect cells (for example Sf9 cells) encompass the pAc series (Smith et al. (1983) Mol. Cell Biol. 3:2156-2165) and the pVL series (Lucklow and Summers (1989) Virology 170:31-39).

[0357] The abovementioned vectors are only a small overview of potentially suitable vectors. Further plasmids are known to the skilled worker and are described, for example, in: Cloning Vectors (Ed. Pouwels, P. H., et al., Elsevier, Amsterdam-New York-Oxford, 1985, ISBN 0 444 904018). Further suitable expression systems for prokaryotic and eukaryotic cells, see the chapters 16 and 17 by Sambrook, J., Fritsch, E. F., and Maniatis, T., Molecular Cloning: A Laboratory Manual, 2nd Edition, Cold Spring Harbor Laboratory, Cold Spring Harbor Laboratory Press, Cold Spring Harbor, N.Y., 1989.

[0358] Accordingly, one embodiment of the invention relates to a vector where the nucleic acid molecule according to the invention is linked operably to regulatory sequences which permit the expression in a prokaryotic or eukaryotic or in a prokaryotic and eukaryotic host.

[0359] Accordingly, one embodiment of the invention relates to a host cell, which has been transformed stably or transiently with the vector according to the invention or the nucleic acid molecule according to the invention or the nucleic acid construct according to the invention.

[0360] Depending on the host organism, the organisms used in the process according to the invention are cultured or grown in a manner with which the skilled worker is familiar. As a rule, microorganisms are grown in a liquid medium comprising a carbon source, usually in the form of sugars, a nitrogen source, usually in the form of organic nitrogen sources such as yeast extract or salts such as ammonium sulfate, trace elements such as iron salts, manganese salts, magnesium salts, and, if appropriate, vitamins, at temperatures between 0° C. and 100° C., preferably between 10° C. and 60° C., while passing in oxygen. In the event the microorganism is anaerobe, no oxygen is blown through the culture medium. The pH value of the liquid nutrient medium may be kept constant, that is to say regulated during the culturing phase, or not. The organisms may be cultured batchwise, semibatchwise or continuously. Nutrients may be provided at the beginning of the fermentation or fed in semicontinuously or continuously.

[0361] The fine chemical produced can be isolated from the organism by methods with which the skilled worker is familiar. For example via extraction, salt precipitation and/or ion-exchange chromatography etc. To this end, the organisms may be disrupted beforehand. The process according to the invention can be conducted batchwise, semibatchwise or continuously. A summary of known culture and isolation techniques can be found in the textbook by Chmiel [Bioprozeβtechnik 1, Einführung in die Bioverfahrenstechnik (Gustav Fischer Verlag, Stuttgart, 1991)], Demain et al. (Industrial Microbiology and Biotechnology, second edition, ASM Press, Washington, D.C., 1999, ISBN 1-55581-128-0] or in the textbook by Storhas [Bioreaktoren und periphere Einrichtungen (Vieweg Verlag, Braunschweig/Wiesbaden, 1994)].

[0362] In one embodiment, the present invention relates to a polypeptide encoded by the nucleic acid molecule according to the present invention, preferably conferring an increase in the fine chemical content in an organism or cell after increasing the expression or activity.

[0363] The present invention also relates to a process for the production of a polypeptide according to the present invention, the polypeptide being expressed in a host cell according to the invention, preferably in a microorganism or a transgenic plant cell.

[0364] In one embodiment, the nucleic acid molecule used in the process for the production of the polypeptide is derived from a microorganism, preferably from a prokaryotic or protozoic cell with a eukaryotic organism as host cell. E.g., in one embodiment the polypeptide is produced in a plant cell or plant with a nucleic acid molecule derived from a prokaryote or a fungus or an alga or another microorganismus but not from plant.

[0365] The skilled worker knows that protein and DNA expressed in different organisms differ in many respects and properties, e.g. DNA modulation and imprinting, such as methylation or post-translational modification, as for example glucosylation, phosphorylation, acetylation, myristoylation, ADP-ribosylation, farnesylation, carboxylation, sulfation, ubiquination, etc. though having the same coding sequence. Preferably, the cellular expression control of the corresponding protein differs accordingly in the control mechanisms controlling the activity and expression of an endogenous protein or another eukaryotic protein. One major difference between proteins expressed in prokaryotic or eukaryotic organisms is the amount and pattern of glycosylation. For example in E. coli there are no glycosylated proteins. Proteins expressed in yeasts have high mannose content in the glycosylated proteins, whereas in plants the glycosylation pattern is complex.

[0366] The polypeptide of the present invention is preferably produced by recombinant DNA techniques. For example, a nucleic acid molecule encoding the protein is cloned into a vector (as described above), the vector is introduced into a host cell (as described above) and said polypeptide is expressed in the host cell. Said polypeptide can then be isolated from the cells by an appropriate purification scheme using standard protein purification techniques. Alternative to recombinant expression, the polypeptide or peptide of the present invention can be synthesized chemically using standard peptide synthesis techniques.

[0367] Moreover, native polypeptides conferring the increase of the fine chemical in an organism or part thereof can be isolated from cells (e.g., endothelial cells), for example using the antibody of the present invention as described below, in particular, an anti-YNL090W protein antibody or an antibody against polypeptides as depicted in SEQ ID NO: 2, 4, 6, 8, 10, 12, 14, 16, 18, 20, 22, 24, 26, 28, 30, 32, 34, 36, 38, 40, 42, 44, 46, 56, 58, 60, 62, 64, 66, 68, 70, 72, 74, 76, 78, 80, 82, 84, 86, 88, 90, 92, 94, 96, 98, 100, 102, 104, 106, 108, 110, 112, 114, 116, 118, 120, 122, 124, 126, 128, 130, 132, 134, 136, 138, 140, 142, 144, 146, 148, 150, 152, 154, 156, 158, 160, 162, 164, 166, 168, 170, 172, 174, 176, 178, 180, 182, 184, 186, 188, 190, 192, 194, 196, 198, 200, 202, 204, 206, 208, 210, 212, 214, 216, 218, 220, 222, 224, 226, 228, 230, 232, 234, 236, 238, 240, 242, 244, 246, 248, 250, 252, 254, 256, 258, 260, 262, 264, 266, 268, 270, 272, 274, 276, 278, 280, 282, 284, 286, 288, 290, 292, 294, 296, 298, 300, 302, 304, 306, 308, 310, 312, 314, 316, 318, 320, 322, 324, 326, 328, 330, 332, 334, 336, 338, 340, 342, 344, 346, 348, 350, 352, 354, 356, 358, 360, 362, 364, 366, 368, 370, 372, 374, 376, 378, 380, 382, 384, 386, 388, 390, 392 or 394, which can be produced by standard techniques utilizing the polypeptid of the present invention or fragment thereof, i.e., the polypeptide of this invention. Preferred are monoclonal antibodies.

[0368] In one embodiment, the present invention relates to a polypeptide having the amino acid sequence encoded by a nucleic acid molecule of the invention or obtainable by a process of the invention. Said polypeptide confers preferably the aforementioned activity, in particular, the polypeptide confers the increase of the fine chemical in a cell or an organsim or a part thereof after increasing the cellular activity, e.g. by increasing the expression or the specific activity of the polypeptide.

[0369] In one embodiment, the present invention relates to a polypeptide having the sequence as depicted in SEQ ID NO: 2, 4, 6, 8, 10, 12, 14, 16, 18, 20, 22, 24, 26, 28, 30, 32, 34, 36, 38, 40, 42, 44, 46, 56, 58, 60, 62, 64, 66, 68, 70, 72, 74, 76, 78, 80, 82, 84, 86, 88, 90, 92, 94, 96, 98, 100, 102, 104, 106, 108, 110, 112, 114, 116, 118, 120, 122, 124, 126, 128, 130, 132, 134, 136, 138, 140, 142, 144, 146, 148, 150, 152, 154, 156, 158, 160, 162, 164, 166, 168, 170, 172, 174, 176, 178, 180, 182, 184, 186, 188, 190, 192, 194, 196, 198, 200, 202, 204, 206, 208, 210, 212, 214, 216, 218, 220, 222, 224, 226, 228, 230, 232, 234, 236, 238, 240, 242, 244, 246, 248, 250, 252, 254, 256, 258, 260, 262, 264, 266, 268, 270, 272, 274, 276, 278, 280, 282, 284, 286, 288, 290, 292, 294, 296, 298, 300, 302, 304, 306, 308, 310, 312, 314, 316, 318, 320, 322, 324, 326, 328, 330, 332, 334, 336, 338, 340, 342, 344, 346, 348, 350, 352, 354, 356, 358, 360, 362, 364, 366, 368, 370, 372, 374, 376, 378, 380, 382, 384, 386, 388, 390, 392 or 394 or as coded by the nucleic acid molecule as depicted in SEQ ID NO: 1, 3, 5, 7, 9, 11, 13, 15, 17, 19, 21, 23, 25, 27, 29, 31, 33, 35, 37, 39, 41, 43, 45, 55, 57, 59, 61, 63, 65, 67, 69, 71, 73, 75, 77, 79, 81, 83, 85, 87, 89, 91, 93, 95, 97, 99, 101, 103, 105, 107, 109, 111, 113, 115, 117, 119, 121, 123, 125, 127, 129, 131, 133, 135, 137, 139, 141, 143, 145, 147, 149, 151, 153, 155, 157, 159, 161, 163, 165, 167, 169, 171, 173, 175, 177, 179, 181, 183, 185, 187, 189, 191, 193, 195, 197, 199, 201, 203, 205, 207, 209, 211, 213, 215, 217, 219, 221, 223, 225, 227, 229, 231, 233, 235, 237, 239, 241, 243, 245, 247, 249, 251, 253, 255, 257, 259, 261, 263, 265, 267, 269, 271, 273, 275, 277, 279, 281, 283, 285, 287, 289, 291, 293, 295, 297, 299, 301, 303, 305, 307, 309, 311, 313, 315, 317, 319, 321, 323, 325, 327, 329, 331, 333, 335, 337, 339, 341, 343, 345, 347, 349, 351, 353, 355, 357, 359, 361, 363, 365, 367, 369, 371, 373, 375, 377, 379, 381, 383, 385, 387, 389, 391or 393 or functional homologues thereof.

[0370] In one advantageous embodiment, in the method of the present invention the activity of a polypeptide is increased comprising or consisting of the consensus sequence as depicted in SEQ ID NO: 47, SEQ ID NO: 48, SEQ ID NO: 49, SEQ ID NO: 50, SEQ ID NO: 51, SEQ ID NO: 52, SEQ ID NO: 397, SEQ ID NO: 398, SEQ ID NO: 399 and/or SEQ ID NO: 400 and in one another embodiment, the present invention relates to a polypeptide comprising or consisting of the consensus sequence as depicted in SEQ ID NO: 47, SEQ ID NO: 48, SEQ ID NO: 49, SEQ ID NO: 50, SEQ ID NO: 51, SEQ ID NO: 52, SEQ ID NO: 397, SEQ ID NO: 398, SEQ ID NO: 399 and/or SEQ ID NO: 400 whereby 20 or less, preferably 15 or 10, preferably 9, 8, 7, or 6, more preferred 5 or 4, even more preferred 3, even more preferred 2, even more preferred 1, most preferred 0 of the amino acids positions indicated can be replaced by any amino acid.

[0371] In one embodiment not more than 15%, preferably 10%, even more preferred 5%, 4%, 3%, or 2%, most preferred 1% or 0% of the amino acid position indicated by a letter are/is replaced another amino acid.

[0372] In one embodiment 20 or less, preferably 15 or 10, preferably 9, 8, 7, or 6, more preferred 5 or 4, even more preferred 3, even more preferred 2, even more preferred 1, most preferred 0 amino acids are inserted into the consensus sequence.

[0373] The consensus sequences of specified domains were derived from a multiple alignment of all sequences. The consensus sequences are disclosed under SEQ ID NO: 47, SEQ ID NO: 48, SEQ ID NO: 49, SEQ ID NO: 50, SEQ ID NO: 51, SEQ ID NO: 52, SEQ ID NO: 397, SEQ ID NO: 398, SEQ ID NO: 399 and/or SEQ ID NO: 400. The letters represent the three letter amino acid code and indicate that the amino acids are conserved in all aligned proteins. The letter Xaa stands for amino acids, which are not conserved in all sequences. In some cases of the sequences as depicted in SEQ ID NO: 47, SEQ ID NO: 48, SEQ ID NO: 49, SEQ ID NO: 50, SEQ ID NO: 51, SEQ ID NO: 52, SEQ ID NO: 397, SEQ ID NO: 398, SEQ ID NO: 399 and/or SEQ ID NO: 400 preferred amino acids are mentioned in the sequence protocol in others all natural amino acids are possible. FIG. 1 shows an alignment with part of the sequences in the one letter amino acid code. The conserved sequences are framed.

[0374] The alignment was performed either with the Software AlignX (Sep. 25, 2002) a component of Vector NTI Suite 8.0, InforMax™, Invitrogen™ life science software, U.S. Main Office, 7305 Executive Way, Frederick, Md. 21704, USA with the following settings: For pairwise alignments: gap opening penality: 10.0; gap extension penality 0.1. For multiple alignments: Gap opening penalty: 10.0; Gap extension penalty: 0.1; Gap separation penalty range: 8; Residue substitution matrix: blosum62; Hydrophilic residues: G P S N D Q E K R; Transition weighting: 0.5; Consensus calculation options: Residue fraction for consensus: 1 or preferably the percent sequence identity between two nucleic acid or polypeptide sequences was determined using the Vector NTI 6.0 (PC) software package (InforMax, 7600 Wisconsin Ave., Bethesda, Md. 20814). A gap opening penalty of 15 and a gap extension penalty of 6.66 are used for determining the percent identity of two nucleic acids. A gap opening penalty of 10 and a gap extension penalty of 0.1 are used for determining the percent identity of two polypeptides. All other parameters are set at the default settings. For purposes of a multiple alignment (Clustal W algorithm), the gap opening penalty is 10, and the gap extension penalty is 0.05 with blosum62 matrix.

[0375] In one advantageous embodiment, the method of the present invention comprises the increasing of a polypeptide comprising or consisting of plant or microorganism specific consensus sequences.

[0376] In one embodiment, said polypeptide of the invention distinguishes over the sequence as depicted in SEQ ID NO: 2, 4, 6, 8, 10, 12, 14, 16, 18, 20, 22, 24, 26, 28, 30, 32, 34, 36, 38, 40, 42, 44, 46, 56, 58, 60, 62, 64, 66, 68, 70, 72, 74, 76, 78, 80, 82, 84, 86, 88, 90, 92, 94, 96, 98, 100, 102, 104, 106, 108, 110, 112, 114, 116, 118, 120, 122, 124, 126, 128, 130, 132, 134, 136, 138, 140, 142, 144, 146, 148, 150, 152, 154, 156, 158, 160, 162, 164, 166, 168, 170, 172, 174, 176, 178, 180, 182, 184, 186, 188, 190, 192, 194, 196, 198, 200, 202, 204, 206, 208, 210, 212, 214, 216, 218, 220, 222, 224, 226, 228, 230, 232, 234, 236, 238, 240, 242, 244, 246, 248, 250, 252, 254, 256, 258, 260, 262, 264, 266, 268, 270, 272, 274, 276, 278, 280, 282, 284, 286, 288, 290, 292, 294, 296, 298, 300, 302, 304, 306, 308, 310, 312, 314, 316, 318, 320, 322, 324, 326, 328, 330, 332, 334, 336, 338, 340, 342, 344, 346, 348, 350, 352, 354, 356, 358, 360, 362, 364, 366, 368, 370, 372, 374, 376, 378, 380, 382, 384, 386, 388, 390, 392 or 394 by one or more amino acids. In one embodiment, polypeptide distinguishes form the sequence as depicted in SEQ ID NO: 2, 4, 6, 8, 10, 12, 14, 16, 18, 20, 22, 24, 26, 28, 30, 32, 34, 36, 38, 40, 42, 44, 46, 56, 58, 60, 62, 64, 66, 68, 70, 72, 74, 76, 78, 80, 82, 84, 86, 88, 90, 92, 94, 96, 98, 100, 102, 104, 106, 108, 110, 112, 114, 116, 118, 120, 122, 124, 126, 128, 130, 132, 134, 136, 138, 140, 142, 144, 146, 148, 150, 152, 154, 156, 158, 160, 162, 164, 166, 168, 170, 172, 174, 176, 178, 180, 182, 184, 186, 188, 190, 192, 194, 196, 198, 200, 202, 204, 206, 208, 210, 212, 214, 216, 218, 220, 222, 224, 226, 228, 230, 232, 234, 236, 238, 240, 242, 244, 246, 248, 250, 252, 254, 256, 258, 260, 262, 264, 266, 268, 270, 272, 274, 276, 278, 280, 282, 284, 286, 288, 290, 292, 294, 296, 298, 300, 302, 304, 306, 308, 310, 312, 314, 316, 318, 320, 322, 324, 326, 328, 330, 332, 334, 336, 338, 340, 342, 344, 346, 348, 350, 352, 354, 356, 358, 360, 362, 364, 366, 368, 370, 372, 374, 376, 378, 380, 382, 384, 386, 388, 390, 392 or 394 by more than 5, 6, 7, 8 or 9 amino acids, preferably by more than 10, 15, 20, 25 or 30 amino acids, evenmore preferred are more than 40, 50, or 60 amino acids and, preferably, the sequence of the polypeptide of the invention distinguishes from the sequence as depicted in SEQ ID NO: 2, 4, 6, 8, 10, 12, 14, 16, 18, 20, 22, 24, 26, 28, 30, 32, 34, 36, 38, 40, 42, 44, 46, 56, 58, 60, 62, 64, 66, 68, 70, 72, 74, 76, 78, 80, 82, 84, 86, 88, 90, 92, 94, 96, 98, 100, 102, 104, 106, 108, 110, 112, 114, 116, 118, 120, 122, 124, 126, 128, 130, 132, 134, 136, 138, 140, 142, 144, 146, 148, 150, 152, 154, 156, 158, 160, 162, 164, 166, 168, 170, 172, 174, 176, 178, 180, 182, 184, 186, 188, 190, 192, 194, 196, 198, 200, 202, 204, 206, 208, 210, 212, 214, 216, 218, 220, 222, 224, 226, 228, 230, 232, 234, 236, 238, 240, 242, 244, 246, 248, 250, 252, 254, 256, 258, 260, 262, 264, 266, 268, 270, 272, 274, 276, 278, 280, 282, 284, 286, 288, 290, 292, 294, 296, 298, 300, 302, 304, 306, 308, 310, 312, 314, 316, 318, 320, 322, 324, 326, 328, 330, 332, 334, 336, 338, 340, 342, 344, 346, 348, 350, 352, 354, 356, 358, 360, 362, 364, 366, 368, 370, 372, 374, 376, 378, 380, 382, 384, 386, 388, 390, 392 or 394 by not more than 80% or 70% of the amino acids, preferably not more than 60% or 50%, more preferred not more than 40% or 30%, even more preferred not more than 20% or 10%. In an other embodiment, said polypeptide of the invention does not consist of the sequence as depicted in SEQ ID NO: 2, 4, 6, 8, 10, 12, 14, 16, 18, 20, 22, 24, 26, 28, 30, 32, 34, 36, 38, 40, 42, 44, 46, 56, 58, 60, 62, 64, 66, 68, 70, 72, 74, 76, 78, 80, 82, 84, 86, 88, 90, 92, 94, 96, 98, 100, 102, 104, 106, 108, 110, 112, 114, 116, 118, 120, 122, 124, 126, 128, 130, 132, 134, 136, 138, 140, 142, 144, 146, 148, 150, 152, 154, 156, 158, 160, 162, 164, 166, 168, 170, 172, 174, 176, 178, 180, 182, 184, 186, 188, 190, 192, 194, 196, 198, 200, 202, 204, 206, 208, 210, 212, 214, 216, 218, 220, 222, 224, 226, 228, 230, 232, 234, 236, 238, 240, 242, 244, 246, 248, 250, 252, 254, 256, 258, 260, 262, 264, 266, 268, 270, 272, 274, 276, 278, 280, 282, 284, 286, 288, 290, 292, 294, 296, 298, 300, 302, 304, 306, 308, 310, 312, 314, 316, 318, 320, 322, 324, 326, 328, 330, 332, 334, 336, 338, 340, 342, 344, 346, 348, 350, 352, 354, 356, 358, 360, 362, 364, 366, 368, 370, 372, 374, 376, 378, 380, 382, 384, 386, 388, 390, 392 or 394.

[0377] In one embodiment, the polypeptide of the invention comprises any one of the sequences not known to the public before. In one embodiment, the polypeptide of the invention orginates from a non-plant cell, in particular from a microorganism, and was expressed in a plant cell. In one embodiment, the present invention relates to a polypeptide encoded by the nucleic acid molecule of the invention or used in the process of the invention for which an activity has not been described yet.

[0378] In one embodiment, the invention relates to polypeptide conferring an increase in the fine chemical in an organism or part being encoded by the nucleic acid molecule of the invention or used in the process of the invention and having a sequence which distinguishes from the sequence as depicted in SEQ ID NO: 2, 4, 6, 8, 10, 12, 14, 16, 18, 20, 22, 24, 26, 28, 30, 32, 34, 36, 38, 40, 42, 44, 46, 56, 58, 60, 62, 64, 66, 68, 70, 72, 74, 76, 78, 80, 82, 84, 86, 88, 90, 92, 94, 96, 98, 100, 102, 104, 106, 108, 110, 112, 114, 116, 118, 120, 122, 124, 126, 128, 130, 132, 134, 136, 138, 140, 142, 144, 146, 148, 150, 152, 154, 156, 158, 160, 162, 164, 166, 168, 170, 172, 174, 176, 178, 180, 182, 184, 186, 188, 190, 192, 194, 196, 198, 200, 202, 204, 206, 208, 210, 212, 214, 216, 218, 220, 222, 224, 226, 228, 230, 232, 234, 236, 238, 240, 242, 244, 246, 248, 250, 252, 254, 256, 258, 260, 262, 264, 266, 268, 270, 272, 274, 276, 278, 280, 282, 284, 286, 288, 290, 292, 294, 296, 298, 300, 302, 304, 306, 308, 310, 312, 314, 316, 318, 320, 322, 324, 326, 328, 330, 332, 334, 336, 338, 340, 342, 344, 346, 348, 350, 352, 354, 356, 358, 360, 362, 364, 366, 368, 370, 372, 374, 376, 378, 380, 382, 384, 386, 388, 390, 392 or 394 by one or more amino acids. In an other embodiment, said polypeptide of the invention does not consist of the sequence as depicted in SEQ ID NO: 2, 4, 6, 8, 10, 12, 14, 16, 18, 20, 22, 24, 26, 28, 30, 32, 34, 36, 38, 40, 42, 44, 46, 56, 58, 60, 62, 64, 66, 68, 70, 72, 74, 76, 78, 80, 82, 84, 86, 88, 90, 92, 94, 96, 98, 100, 102, 104, 106, 108, 110, 112, 114, 116, 118, 120, 122, 124, 126, 128, 130, 132, 134, 136, 138, 140, 142, 144, 146, 148, 150, 152, 154, 156, 158, 160, 162, 164, 166, 168, 170, 172, 174, 176, 178, 180, 182, 184, 186, 188, 190, 192, 194, 196, 198, 200, 202, 204, 206, 208, 210, 212, 214, 216, 218, 220, 222, 224, 226, 228, 230, 232, 234, 236, 238, 240, 242, 244, 246, 248, 250, 252, 254, 256, 258, 260, 262, 264, 266, 268, 270, 272, 274, 276, 278, 280, 282, 284, 286, 288, 290, 292, 294, 296, 298, 300, 302, 304, 306, 308, 310, 312, 314, 316, 318, 320, 322, 324, 326, 328, 330, 332, 334, 336, 338, 340, 342, 344, 346, 348, 350, 352, 354, 356, 358, 360, 362, 364, 366, 368, 370, 372, 374, 376, 378, 380, 382, 384, 386, 388, 390, 392 or 394. In a further embodiment, said polypeptide of the present invention is less than 100%, 99.999%, 99.99%, 99.9% or 99% identical. In one embodiment, said polypeptide does not consist of the sequence encoded by the nucleic acid molecules as depicted in SEQ ID NO: 1, 3, 5, 7, 9, 11, 13, 15, 17, 19, 21, 23, 25, 27, 29, 31, 33, 35, 37, 39, 41, 43, 45, 55, 57, 59, 61, 63, 65, 67, 69, 71, 73, 75, 77, 79, 81, 83, 85, 87, 89, 91, 93, 95, 97, 99, 101, 103, 105, 107, 109, 111, 113, 115, 117, 119, 121, 123, 125, 127, 129, 131, 133, 135, 137, 139, 141, 143, 145, 147, 149, 151, 153, 155, 157, 159, 161, 163, 165, 167, 169, 171, 173, 175, 177, 179, 181, 183, 185, 187, 189, 191, 193, 195, 197, 199, 201, 203, 205, 207, 209, 211, 213, 215, 217, 219, 221, 223, 225, 227, 229, 231, 233, 235, 237, 239, 241, 243, 245, 247, 249, 251, 253, 255, 257, 259, 261, 263, 265, 267, 269, 271, 273, 275, 277, 279, 281, 283, 285, 287, 289, 291, 293, 295, 297, 299, 301, 303, 305, 307, 309, 311, 313, 315, 317, 319, 321, 323, 325, 327, 329, 331, 333, 335, 337, 339, 341, 343, 345, 347, 349, 351, 353, 355, 357, 359, 361, 363, 365, 367, 369, 371, 373, 375, 377, 379, 381, 383, 385, 387, 389, 391 or 393.

[0379] In one embodiment, the present invention relates to a polypeptide having the biological activity represented by a protein as depicted in SEQ ID NO: 2, 4, 6, 8, 10, 12, 14, 16, 18, 20, 22, 24, 26, 28, 30, 32, 34, 36, 38, 40, 42, 44, 46, 56, 58, 60, 62, 64, 66, 68, 70, 72, 74, 76, 78, 80, 82, 84, 86, 88, 90, 92, 94, 96, 98, 100, 102, 104, 106, 108, 110, 112, 114, 116, 118, 120, 122, 124, 126, 128, 130, 132, 134, 136, 138, 140, 142, 144, 146, 148, 150, 152, 154, 156, 158, 160, 162, 164, 166, 168, 170, 172, 174, 176, 178, 180, 182, 184, 186, 188, 190, 192, 194, 196, 198, 200, 202, 204, 206, 208, 210, 212, 214, 216, 218, 220, 222, 224, 226, 228, 230, 232, 234, 236, 238, 240, 242, 244, 246, 248, 250, 252, 254, 256, 258, 260, 262, 264, 266, 268, 270, 272, 274, 276, 278, 280, 282, 284, 286, 288, 290, 292, 294, 296, 298, 300, 302, 304, 306, 308, 310, 312, 314, 316, 318, 320, 322, 324, 326, 328, 330, 332, 334, 336, 338, 340, 342, 344, 346, 348, 350, 352, 354, 356, 358, 360, 362, 364, 366, 368, 370, 372, 374, 376, 378, 380, 382, 384, 386, 388, 390, 392 or 394 and which distinguishes over the aforementioned sequences by one or more amino acids, preferably by more than 5, 6, 7, 8 or 9 amino acids, preferably by more than 10, 15, 20, 25 or 30 amino acids, evenmore preferred are more than 40, 50, or 60 amino acids but even more preferred by less than 70% of the amino acids, more preferred by less than 50%, even more preferred my less than 30% or 25%, more preferred are 20% or 15%, even more preferred are less than 10%.

[0380] The terms “protein” and “polypeptide” used in this application are interchangeable. “Polypeptide” refers to a polymer of amino acids (amino acid sequence) and does not refer to a specific length of the molecule. Thus peptides and oligopeptides are included within the definition of polypeptide. This term does also refer to or include post-translational modifications of the polypeptide, for example, glycosylations, acetylations, phosphorylations and the like. Included within the definition are, for example, polypeptides containing one or more analogs of an amino acid (including, for example, unnatural amino acids, etc.), polypeptides with substituted linkages, as well as other modifications known in the art, both naturally occurring and non-naturally occurring.

[0381] Preferably, the polypeptide is isolated. An “isolated” or “purified” protein or nucleic acid molecule or biologically active portion thereof is substantially free of cellular material when produced by recombinant DNA techniques or chemical precursors or other chemicals when chemically synthesized.

[0382] The language “substantially free of cellular material” includes preparations of the polypeptide of the invention in which the protein is separated from cellular components of the cells in which it is naturally or recombinantly produced. In one embodiment, the language “substantially free of cellular material” includes preparations having less than about 30% (by dry weight) of “contaminating protein”, more preferably less than about 20% of “contaminating protein”, still more preferably less than about 10% of “contaminating protein”, and most preferably less than about 5% “contaminating protein”. The term “Contaminating protein” relates to polypeptides, which are not polypeptides of the present invention. When the polypeptide of the present invention or biologically active portion thereof is recombinantly produced, it is also preferably substantially free of culture medium, i.e., culture medium represents less than about 20%, more preferably less than about 10%, and most preferably less than about 5% of the volume of the protein preparation. The language “substantially free of chemical precursors or other chemicals” includes preparations in which the polypeptide of the present invention is separated from chemical precursors or other chemicals, which are involved in the synthesis of the protein. The language “substantially free of chemical precursors or other chemicals” includes preparations having less than about 30% (by dry weight) of chemical precursors or non-polypeptide of the inventionchemicals, more preferably less than about 20% chemical precursors or non-polypeptide of the inventionchemicals, still more preferably less than about 10% chemical precursors or non-polypeptide of the invention-chemicals, and most preferably less than about 5% chemical precursors or non-polypeptide of the invention-chemicals. In preferred embodiments, isolated proteins or biologically active portions thereof lack contaminating proteins from the same organism from which the polypeptide of the present invention is derived. Typically, such proteins are produced by recombinant techniques.

[0383] A polypeptide of the invention can participate in the process of the present invention. The polypeptide or a portion thereof comprises preferably an amino acid sequence which is sufficiently homologous to an amino acid sequence as depicted in SEQ ID NO: 2, 4, 6, 8, 10, 12, 14, 16, 18, 20, 22, 24, 26, 28, 30, 32, 34, 36, 38, 40, 42, 44, 46, 56, 58, 60, 62, 64, 66, 68, 70, 72, 74, 76, 78, 80, 82, 84, 86, 88, 90, 92, 94, 96, 98, 100, 102, 104, 106, 108, 110, 112, 114, 116, 118, 120, 122, 124, 126, 128, 130, 132, 134, 136, 138, 140, 142, 144, 146, 148, 150, 152, 154, 156, 158, 160, 162, 164, 166, 168, 170, 172, 174, 176, 178, 180, 182, 184, 186, 188, 190, 192, 194, 196, 198, 200, 202, 204, 206, 208, 210, 212, 214, 216, 218, 220, 222, 224, 226, 228, 230, 232, 234, 236, 238, 240, 242, 244, 246, 248, 250, 252, 254, 256, 258, 260, 262, 264, 266, 268, 270, 272, 274, 276, 278, 280, 282, 284, 286, 288, 290, 292, 294, 296, 298, 300, 302, 304, 306, 308, 310, 312, 314, 316, 318, 320, 322, 324, 326, 328, 330, 332, 334, 336, 338, 340, 342, 344, 346, 348, 350, 352, 354, 356, 358, 360, 362, 364, 366, 368, 370, 372, 374, 376, 378, 380, 382, 384, 386, 388, 390, 392 or 394 such that the protein or portion thereof maintains the ability to confer the activity of the present invention. The portion of the protein is preferably a biologically active portion as described herein. Preferably, the polypeptide used in the process of the invention has an amino acid sequence identical as shown in SEQ ID NO: 2, 4, 6, 8, 10, 12, 14, 16, 18, 20, 22, 24, 26, 28, 30, 32, 34, 36, 38, 40, 42, 44, 46, 56, 58, 60, 62, 64, 66, 68, 70, 72, 74, 76, 78, 80, 82, 84, 86, 88, 90, 92, 94, 96, 98, 100, 102, 104, 106, 108, 110, 112, 114, 116, 118, 120, 122, 124, 126, 128, 130, 132, 134, 136, 138, 140, 142, 144, 146, 148, 150, 152, 154, 156, 158, 160, 162, 164, 166, 168, 170, 172, 174, 176, 178, 180, 182, 184, 186, 188, 190, 192, 194, 196, 198, 200, 202, 204, 206, 208, 210, 212, 214, 216, 218, 220, 222, 224, 226, 228, 230, 232, 234, 236, 238, 240, 242, 244, 246, 248, 250, 252, 254, 256, 258, 260, 262, 264, 266, 268, 270, 272, 274, 276, 278, 280, 282, 284, 286, 288, 290, 292, 294, 296, 298, 300, 302, 304, 306, 308, 310, 312, 314, 316, 318, 320, 322, 324, 326, 328, 330, 332, 334, 336, 338, 340, 342, 344, 346, 348, 350, 352, 354, 356, 358, 360, 362, 364, 366, 368, 370, 372, 374, 376, 378, 380, 382, 384, 386, 388, 390, 392 or 394.

[0384] Further, the polypeptide can have an amino acid sequence which is encoded by a nucleotide sequence which hybridizes, preferably hybridizes under stringent conditions as described above, to a nucleotide sequence of the nucleic acid molecule of the present invention. Accordingly, the polypeptide has an amino acid sequence which is encoded by a nucleotide sequence that is at least about 35%, 40%, 45%, 50%, 55%, 60%, 65% or 70%, preferably at least about 75%, 80%, 85% or 90, and more preferably at least about 91%, 92%, 93%, 94% or 95%, and even more preferably at least about 96%, 97%, 98%, 99% or more homologous to one of the amino acid sequences of SEQ ID NO: 2, 4, 6, 8, 10, 12, 14, 16, 18, 20, 22, 24, 26, 28, 30, 32, 34, 36, 38, 40, 42, 44, 46, 56, 58, 60, 62, 64, 66, 68, 70, 72, 74, 76, 78, 80, 82, 84, 86, 88, 90, 92, 94, 96, 98, 100, 102, 104, 106, 108, 110, 112, 114, 116, 118, 120, 122, 124, 126, 128, 130, 132, 134, 136, 138, 140, 142, 144, 146, 148, 150, 152, 154, 156, 158, 160, 162, 164, 166, 168, 170, 172, 174, 176, 178, 180, 182, 184, 186, 188, 190, 192, 194, 196, 198, 200, 202, 204, 206, 208, 210, 212, 214, 216, 218, 220, 222, 224, 226, 228, 230, 232, 234, 236, 238, 240, 242, 244, 246, 248, 250, 252, 254, 256, 258, 260, 262, 264, 266, 268, 270, 272, 274, 276, 278, 280, 282, 284, 286, 288, 290, 292, 294, 296, 298, 300, 302, 304, 306, 308, 310, 312, 314, 316, 318, 320, 322, 324, 326, 328, 330, 332, 334, 336, 338, 340, 342, 344, 346, 348, 350, 352, 354, 356, 358, 360, 362, 364, 366, 368, 370, 372, 374, 376, 378, 380, 382, 384, 386, 388, 390, 392 or 394. The preferred polypeptide of the present invention preferably possesses at least one of the activities according to the invention and described herein. A preferred polypeptide of the present invention includes an amino acid sequence encoded by a nucleotide sequence which hybridizes, preferably hybridizes under stringent conditions, to a nucleotide sequence of SEQ ID NO: 1, 3, 5, 7, 9, 11, 13, 15, 17, 19, 21, 23, 25, 27, 29, 31, 33, 35, 37, 39, 41, 43, 45, 55, 57, 59, 61, 63, 65, 67, 69, 71, 73, 75, 77, 79, 81, 83, 85, 87, 89, 91, 93, 95, 97, 99, 101, 103, 105, 107, 109, 111, 113, 115, 117, 119, 121, 123, 125, 127, 129, 131, 133, 135, 137, 139, 141, 143, 145, 147, 149, 151, 153, 155, 157, 159, 161, 163, 165, 167, 169, 171, 173, 175, 177, 179, 181, 183, 185, 187, 189, 191, 193, 195, 197, 199, 201, 203, 205, 207, 209, 211, 213, 215, 217, 219, 221, 223, 225, 227, 229, 231, 233, 235, 237, 239, 241, 243, 245, 247, 249, 251, 253, 255, 257, 259, 261, 263, 265, 267, 269, 271, 273, 275, 277, 279, 281, 283, 285, 287, 289, 291, 293, 295, 297, 299, 301, 303, 305, 307, 309, 311, 313, 315, 317, 319, 321, 323, 325, 327, 329, 331, 333, 335, 337, 339, 341, 343, 345, 347, 349, 351, 353, 355, 357, 359, 361, 363, 365, 367, 369, 371, 373, 375, 377, 379, 381, 383, 385, 387, 389, 391 or 393 or which is homologous thereto, as defined above.

[0385] Accordingly the polypeptide of the present invention can vary from SEQ ID NO: 2, 4, 6, 8, 10, 12, 14, 16, 18, 20, 22, 24, 26, 28, 30, 32, 34, 36, 38, 40, 42, 44, 46, 56, 58, 60, 62, 64, 66, 68, 70, 72, 74, 76, 78, 80, 82, 84, 86, 88, 90, 92, 94, 96, 98, 100, 102, 104, 106, 108, 110, 112, 114, 116, 118, 120, 122, 124, 126, 128, 130, 132, 134, 136, 138, 140, 142, 144, 146, 148, 150, 152, 154, 156, 158, 160, 162, 164, 166, 168, 170, 172, 174, 176, 178, 180, 182, 184, 186, 188, 190, 192, 194, 196, 198, 200, 202, 204, 206, 208, 210, 212, 214, 216, 218, 220, 222, 224, 226, 228, 230, 232, 234, 236, 238, 240, 242, 244, 246, 248, 250, 252, 254, 256, 258, 260, 262, 264, 266, 268, 270, 272, 274, 276, 278, 280, 282, 284, 286, 288, 290, 292, 294, 296, 298, 300, 302, 304, 306, 308, 310, 312, 314, 316, 318, 320, 322, 324, 326, 328, 330, 332, 334, 336, 338, 340, 342, 344, 346, 348, 350, 352, 354, 356, 358, 360, 362, 364, 366, 368, 370, 372, 374, 376, 378, 380, 382, 384, 386, 388, 390, 392 or 394 in amino acid sequence due to natural variation or mutagenesis, as described in detail herein. Accordingly, the polypeptide comprise an amino acid sequence which is at least about 35%, 40%, 45%, 50%, 55%, 60%, 65% or 70%, preferably at least about 75%, 80%, 85% or 90, and more preferably at least about 91%, 92%, 93%, 94% or 95%, and most preferably at least about 96%, 97%, 98%, 99% or more homologous to an entire amino acid sequence of SEQ ID NO: 2, 4, 6, 8, 10, 12, 14, 16, 18, 20, 22, 24, 26, 28, 30, 32, 34, 36, 38, 40, 42, 44, 46, 56, 58, 60, 62, 64, 66, 68, 70, 72, 74, 76, 78, 80, 82, 84, 86, 88, 90, 92, 94, 96, 98, 100, 102, 104, 106, 108, 110, 112, 114, 116, 118, 120, 122, 124, 126, 128, 130, 132, 134, 136, 138, 140, 142, 144, 146, 148, 150, 152, 154, 156, 158, 160, 162, 164, 166, 168, 170, 172, 174, 176, 178, 180, 182, 184, 186, 188, 190, 192, 194, 196, 198, 200, 202, 204, 206, 208, 210, 212, 214, 216, 218, 220, 222, 224, 226, 228, 230, 232, 234, 236, 238, 240, 242, 244, 246, 248, 250, 252, 254, 256, 258, 260, 262, 264, 266, 268, 270, 272, 274, 276, 278, 280, 282, 284, 286, 288, 290, 292, 294, 296, 298, 300, 302, 304, 306, 308, 310, 312, 314, 316, 318, 320, 322, 324, 326, 328, 330, 332, 334, 336, 338, 340, 342, 344, 346, 348, 350, 352, 354, 356, 358, 360, 362, 364, 366, 368, 370, 372, 374, 376, 378, 380, 382, 384, 386, 388, 390, 392 or 394.

[0386] For the comparison of amino acid sequences the same algorithms as described above or nucleic acid sequences can be used. Results of high quality are reached by using the algorithm of Needleman and Wunsch or Smith and Waterman. Therefore programs based on said algorithms are preferred. Advantageously the comparisons of sequences can be done with the program PileUp (J. Mol. Evolution., 25, 351-360, 1987, Higgins et al., CABIOS, 5 1989: 151-153) or preferably with the programs Gap and BestFit, which are respectively based on the algorithms of Needleman and Wunsch [J. Mol. Biol. 48; 443-453 (1970)] and Smith and Waterman [Adv. Appl. Math. 2; 482-489 (1981)]. Both programs are part of the GCG software-package [Genetics Computer Group, 575 Science Drive, Madison, Wis., USA 53711 (1991); Altschul et al. (1997) Nucleic Acids Res. 25:3389 et seq.]. Therefore preferably the calculations to determine the perentages of sequence homology are done with the program Gap over the whole range of the sequences. The following standard adjustments for the comparison of amino acid sequences were used: gap weight: 8, length weight: 2, average match: 2.912, average mismatch: −2.003.

[0387] Biologically active portions of an polypeptide of the present invention include peptides comprising amino acid sequences derived from the amino acid sequence of the polypeptide of the present invention or used in the process of the present invention, e.g., the amino acid sequence shown in SEQ ID NO: 2, 4, 6, 8, 10, 12, 14, 16, 18, 20, 22, 24, 26, 28, 30, 32, 34, 36, 38, 40, 42, 44, 46, 56, 58, 60, 62, 64, 66, 68, 70, 72, 74, 76, 78, 80, 82, 84, 86, 88, 90, 92, 94, 96, 98, 100, 102, 104, 106, 108, 110, 112, 114, 116, 118, 120, 122, 124, 126, 128, 130, 132, 134, 136, 138, 140, 142, 144, 146, 148, 150, 152, 154, 156, 158, 160, 162, 164, 166, 168, 170, 172, 174, 176, 178, 180, 182, 184, 186, 188, 190, 192, 194, 196, 198, 200, 202, 204, 206, 208, 210, 212, 214, 216, 218, 220, 222, 224, 226, 228, 230, 232, 234, 236, 238, 240, 242, 244, 246, 248, 250, 252, 254, 256, 258, 260, 262, 264, 266, 268, 270, 272, 274, 276, 278, 280, 282, 284, 286, 288, 290, 292, 294, 296, 298, 300, 302, 304, 306, 308, 310, 312, 314, 316, 318, 320, 322, 324, 326, 328, 330, 332, 334, 336, 338, 340, 342, 344, 346, 348, 350, 352, 354, 356, 358, 360, 362, 364, 366, 368, 370, 372, 374, 376, 378, 380, 382, 384, 386, 388, 390, 392 or 394 or the amino acid sequence of a protein homologous thereto, which include fewer amino acids than a full length polypeptide of the present invention or used in the process of the present invention or the full length protein which is homologous to an polypeptide of the present invention or used in the process of the present invention depicted herein, and exhibit at least one activity of polypeptide of the present invention or used in the process of the present invention.

[0388] Typically, biologically (or immunologically) active portions i.e. peptides, e.g., peptides which are, for example, 5, 10, 15, 20, 30, 35, 36, 37, 38, 39, 40, 50, 100 or more amino acids in length comprise a domain or motif with at least one activity or epitope of a polypeptide of the present invention or used in the process of the present invention. Moreover, other biologically active portions, in which other regions of the polypeptide are deleted, can be prepared by recombinant techniques and evaluated for one or more of the activities described herein.

[0389] Manipulation of the nucleic acid molecule of the invention may result in the production of proteins having the biological activity represented by a protein as depicted in SEQ ID NO: 2, 4, 6, 8, 10, 12, 14, 16, 18, 20, 22, 24, 26, 28, 30, 32, 34, 36, 38, 40, 42, 44, 46, 56, 58, 60, 62, 64, 66, 68, 70, 72, 74, 76, 78, 80, 82, 84, 86, 88, 90, 92, 94, 96, 98, 100, 102, 104, 106, 108, 110, 112, 114, 116, 118, 120, 122, 124, 126, 128, 130, 132, 134, 136, 138, 140, 142, 144, 146, 148, 150, 152, 154, 156, 158, 160, 162, 164, 166, 168, 170, 172, 174, 176, 178, 180, 182, 184, 186, 188, 190, 192, 194, 196, 198, 200, 202, 204, 206, 208, 210, 212, 214, 216, 218, 220, 222, 224, 226, 228, 230, 232, 234, 236, 238, 240, 242, 244, 246, 248, 250, 252, 254, 256, 258, 260, 262, 264, 266, 268, 270, 272, 274, 276, 278, 280, 282, 284, 286, 288, 290, 292, 294, 296, 298, 300, 302, 304, 306, 308, 310, 312, 314, 316, 318, 320, 322, 324, 326, 328, 330, 332, 334, 336, 338, 340, 342, 344, 346, 348, 350, 352, 354, 356, 358, 360, 362, 364, 366, 368, 370, 372, 374, 376, 378, 380, 382, 384, 386, 388, 390, 392 or 394 and having differences from said aforementioned wild-type proteins. These proteins may be improved in efficiency or activity, may be present in greater numbers in the cell than is usual, or may be decreased in efficiency or activity in relation to the wild type protein.

[0390] Any mutagenesis strategies for the polypeptide of the present invention or the polypeptide used in the process of the present invention to result in increasing said activity are not meant to be limiting; variations on these strategies will be readily apparent to one skilled in the art. Using such strategies, and incorporating the mechanisms disclosed herein, the nucleic acid molecule and polypeptide of the invention may be utilized to generate plants or parts thereof, expressing wildtype proteins of the invention or mutated protein encoding nucleic acid molecules and polypeptide molecules of the invention such that the yield, production, and/or efficiency of production of a desired compound is improved.

[0391] This desired compound may be any natural product of plants, which includes the final products of biosynthesis pathways and intermediates of naturally-occurring metabolic pathways, as well as molecules which do not naturally occur in the metabolism of said cells, but which are produced by a said cells of the invention. Preferrably, the compound is a composition of amino acids or a recovered amino acid, in particular, the fine chemical, free or in protein-bound form.

[0392] The invention also provides chimeric or fusion proteins.

[0393] As used herein, an “chimeric protein” or “fusion protein” comprises an polypeptide operatively linked to a polypeptide which does not confer above-mentioned activity, in particulare, which does not confer an increase of content of the fine chemical in a cell or an organism or a part thereof, if its activity is increased.

[0394] In one embodiment, a protein (=polypeptide)” having the biological activity represented by a protein as depicted in SEQ ID NO: 2, 4, 6, 8, 10, 12, 14, 16, 18, 20, 22, 24, 26, 28, 30, 32, 34, 36, 38, 40, 42, 44, 46, 56, 58, 60, 62, 64, 66, 68, 70, 72, 74, 76, 78, 80, 82, 84, 86, 88, 90, 92, 94, 96, 98, 100, 102, 104, 106, 108, 110, 112, 114, 116, 118, 120, 122, 124, 126, 128, 130, 132, 134, 136, 138, 140, 142, 144, 146, 148, 150, 152, 154, 156, 158, 160, 162, 164, 166, 168, 170, 172, 174, 176, 178, 180, 182, 184, 186, 188, 190, 192, 194, 196, 198, 200, 202, 204, 206, 208, 210, 212, 214, 216, 218, 220, 222, 224, 226, 228, 230, 232, 234, 236, 238, 240, 242, 244, 246, 248, 250, 252, 254, 256, 258, 260, 262, 264, 266, 268, 270, 272, 274, 276, 278, 280, 282, 284, 286, 288, 290, 292, 294, 296, 298, 300, 302, 304, 306, 308, 310, 312, 314, 316, 318, 320, 322, 324, 326, 328, 330, 332, 334, 336, 338, 340, 342, 344, 346, 348, 350, 352, 354, 356, 358, 360, 362, 364, 366, 368, 370, 372, 374, 376, 378, 380, 382, 384, 386, 388, 390, 392 or 394 refers to a polypeptide having an amino acid sequence corresponding to the polypeptide of the invention or used in the process of the invention, whereas a “non-polypeptide of the invention” or “other polypeptide” refers to a polypeptide having an amino acid sequence corresponding to a protein which is not substantially homologous a polypeptide of the invention, preferably which is not substantially homologous to a polypeptide having the biological activity represented by a protein as depicted in SEQ ID NO: 2, 4, 6, 8, 10, 12, 14, 16, 18, 20, 22, 24, 26, 28, 30, 32, 34, 36, 38, 40, 42, 44, 46, 56, 58, 60, 62, 64, 66, 68, 70, 72, 74, 76, 78, 80, 82, 84, 86, 88, 90, 92, 94, 96, 98, 100, 102, 104, 106, 108, 110, 112, 114, 116, 118, 120, 122, 124, 126, 128, 130, 132, 134, 136, 138, 140, 142, 144, 146, 148, 150, 152, 154, 156, 158, 160, 162, 164, 166, 168, 170, 172, 174, 176, 178, 180, 182, 184, 186, 188, 190, 192, 194, 196, 198, 200, 202, 204, 206, 208, 210, 212, 214, 216, 218, 220, 222, 224, 226, 228, 230, 232, 234, 236, 238, 240, 242, 244, 246, 248, 250, 252, 254, 256, 258, 260, 262, 264, 266, 268, 270, 272, 274, 276, 278, 280, 282, 284, 286, 288, 290, 292, 294, 296, 298, 300, 302, 304, 306, 308, 310, 312, 314, 316, 318, 320, 322, 324, 326, 328, 330, 332, 334, 336, 338, 340, 342, 344, 346, 348, 350, 352, 354, 356, 358, 360, 362, 364, 366, 368, 370, 372, 374, 376, 378, 380, 382, 384, 386, 388, 390, 392 or 394, e.g., a protein which does not confer the activity described herein and which is derived from the same or a different organism.

[0395] Within the fusion protein, the term “operatively linked” is intended to indicate that the polypeptide of the invention or a polypeptide used in the process of the invention and the “other polypeptide” or a part thereof are fused to each other so that both sequences fulfil the proposed function addicted to the sequence used. The “other polypeptide” can be fused to the N-terminus or C-terminus of the polypeptide of the invention or used in the process of the invention. For example, in one embodiment the fusion protein is a GST-LMRP fusion protein in which the sequences of the polypeptide of the invention or the polypeptide used in the process of the invention are fused to the C-terminus of the GST sequences. Such fusion proteins can facilitate the purification of recombinant polypeptides of the invention or a poylpeptide usefull in the process of the invention.

[0396] In another embodiment, the fusion protein is a polypeptide of the invention or a polypeptide used in the process of the invention containing a heterologous signal sequence at its N-terminus. In certain host cells (e.g., mammalian host cells), expression and/or secretion of a polypeptide of the invention or a poylpeptide used in the process of the invention can be increased through use of a heterologous signal sequence. As already mentioned above, targeting sequences, are required for targeting the gene product into specific cell compartment (for a review, see Kermode, Crit. Rev. Plant Sci. 15, 4 (1996) 285-423 and references cited therein), for example into the vacuole, the nucleus, all types of plastids, such as amyloplasts, chloroplasts, chromoplasts, the extracellular space, the mitochondria, the endoplasmic reticulum, elaioplasts, peroxisomes, glycosomes, and other compartments of cells or extracellular. Sequences, which must be mentioned in this context are, in particular, the signal-peptide- or transit-peptide-encoding sequences which are known per se. For example, plastid-transit-peptide-encoding sequences enable the targeting of the expression product into the plastids of a plant cell. Targeting sequences are also known for eukaryotic and to a lower extent for prokaryotic organisms and can advantageously be operable linked with the nucleic acid molecule of the present invention to achieve an expression in one of said compartments or extracellular.

[0397] Preferably, a chimeric or fusion protein of the invention is produced by standard recombinant DNA techniques. For example, DNA fragments coding for the different polypeptide sequences are ligated together in-frame in accordance with conventional techniques, for example by employing blunt-ended or stagger-ended termini for ligation, restriction enzyme digestion to provide for appropriate termini, filling-in of cohesive ends as appropriate, alkaline phosphatase treatment to avoid undesirable joining, and enzymatic ligation. The fusion gene can be synthesized by conventional techniques including automated DNA synthesizers. Alternatively, PCR amplification of gene fragments can be carried out using anchor primers, which give rise to complementary overhangs between two consecutive gene fragments which can subsequently be annealed and reamplified to generate a chimeric gene sequence (see, for example, Current Protocols in Molecular Biology, eds. Ausubel et al. John Wiley & Sons: 1992). Moreover, many expression vectors are commercially available that already encode a fusion moiety (e.g., a GST polypeptide). The nucleic acid molecule of the invention can be cloned into such an expression vector such that the fusion moiety is linked in-frame to the encoded protein.

[0398] Furthermore, folding simulations and computer redesign of structural motifs of the protein of the invention can be performed using appropriate computer programs (Olszewski, Proteins 25 (1996), 286-299; Hoffman, Comput. Appl. Biosci. 11 (1995), 675-679). Computer modeling of protein folding can be used for the conformational and energetic analysis of detailed peptide and protein models (Monge, J. Mol. Biol. 247 (1995), 995-1012; Renouf, Adv. Exp. Med. Biol. 376 (1995), 37-45). The appropriate programs can be used for the identification of interactive sites the polypeptide of the invention or polypeptides used in the process of the invention and its substrates or binding factors or other interacting proteins by computer assistant searches for complementary peptide sequences (Fassina, Immunomethods (1994), 114-120). Further appropriate computer systems for the design of protein and peptides are described in the prior art, for example in Berry, Biochem. Soc. Trans. 22 (1994), 1033-1036; Wodak, Ann. N.Y. Acad. Sci. 501 (1987), 1-13; Pabo, Biochemistry 25 (1986), 5987-5991. The results obtained from the above-described computer analysis can be used for, e.g., the preparation of peptidomimetics of the protein of the invention or fragments thereof. Such pseudopeptide analogues of the, natural amino acid sequence of the protein may very efficiently mimic the parent protein (Benkirane, J. Biol. Chem. 271 (1996), 33218-33224). For example, incorporation of easily available achiral Q-amino acid residues into a protein of the invention or a fragment thereof results in the substitution of amide bonds by polymethylene units of an aliphatic chain, thereby providing a convenient strategy for constructing a peptidomimetic (Banerjee, Biopolymers 39 (1996), 769-777).

[0399] Superactive peptidomimetic analogues of small peptide hormones in other systems are described in the prior art (Zhang, Biochem. Biophys. Res. Commun. 224 (1996), 327-331). Appropriate peptidomimetics of the protein of the present invention can also be identified by the synthesis of peptidomimetic combinatorial libraries through successive amide alkylation and testing the resulting compounds, e.g., for their binding and immunological properties. Methods for the generation and use of peptidomimetic combinatorial libraries are described in the prior art, for example in Ostresh, Methods in Enzymology 267 (1996), 220-234 and Dorner, Bioorg. Med. Chem. 4 (1996), 709-715.

[0400] Furthermore, a three-dimensional and/or crystallographic structure of the protein of the invention can be used for the design of peptidomimetic inhibitors of the biological activity of the protein of the invention (Rose, Biochemistry 35 (1996), 12933-12944; Rutenber, Bioorg. Med. Chem. 4 (1996), 1545-1558).

[0401] Furthermore, a three-dimensional and/or crystallographic structure of the protein of the invention and the identification of interactive sites the polypeptide of the invention and its substrates or binding factors can be used for design of mutants with modulated binding or turn over activities. For example, the active center of the polypeptide of the present invention can be modelled and amino acid residues participating in the catalytic reaction can be modulated to increase or decrease the binding of the substrate to activate or improve the polypeptide. The identification of the active center and the amino acids involved in the catalytic reaction facilitates the screening for mutants having an increased activity.

[0402] One embodiment of the invention also relates to an antibody, which binds specifically to the polypeptide according to the invention or parts, i.e. specific fragments or epitopes of such a protein.

[0403] The antibodies of the invention can be used to identify and isolate the polypeptide according to the invention and encoding genes in any organism, preferably plants, prepared in plants described herein. These antibodies can be monoclonal antibodies, polyclonal antibodies or synthetic antibodies as well as fragments of antibodies, such as Fab, Fv or scFv fragments etc. Monoclonal antibodies can be prepared, for example, by the techniques as originally described in Köhler and Milstein, Nature 256 (1975), 495, and Galfr6, Meth. Enzymol. 73 (1981), 3, which comprise the fusion of mouse myeloma cells to spleen cells derived from immunized mammals.

[0404] Furthermore, antibodies or fragments thereof to the aforementioned peptides can be obtained by using methods, which are described, e.g., in Harlow and Lane “Antibodies, A Laboratory Manual”, CSH Press, Cold Spring Harbor, 1988. These antibodies can be used, for example, for the immunoprecipitation and immunolocalization of proteins according to the invention as well as for the monitoring of the synthesis of such proteins, for example, in recombinant organisms, and for the identification of compounds interacting with the protein according to the invention. For example, surface plasmon resonance as employed in the BIAcore system can be used to increase the efficiency of phage antibodies selections, yielding a high increment of affinity from a single library of phage antibodies, which bind to an epitope of the protein of the invention (Schier, Human Antibodies Hybridomas 7 (1996), 97-105; Malmborg, J. Immunol. Methods 183 (1995), 7-13). In many cases, the binding phenomena of antibodies to antigens are equivalent to other ligand/anti-ligand binding.

[0405] In one embodiment, the present invention relates to an antisense nucleic acid molecule comprising the complementary sequence of the nucleic acid molecule of the present invention.

[0406] Methods to modify the expression levels and/or the activity are known to persons skilled in the art and include for instance overexpression, co-suppression, the use of ribozymes, sense and anti-sense strategies or other gene silencing approaches like RNA interference (RNAi) or promoter methylation. “Sense strand” refers to the strand of a double-stranded DNA molecule that is homologous to an mRNA transcript thereof. The “anti-sense strand” contains an inverted sequence, which is complementary to that of the “sense strand”.

[0407] In addition the expression levels and/or the activity can be modified by the introduction of mutations in the regulatory or coding regions of the nucleic acids of the invention. Furthermore antibodies can be expressed which specifically binds to a polypeptide of interest and thereby blocks it acitivity. The protein-binding factors can, for example, also be aptamers [Famulok M and Mayer G (1999) Curr. Top Microbiol. Immunol. 243:123-36] or antibodies or antibody fragments or single-chain antibodies. Obtaining these factors has been described, and the skilled worker is familiar therewith. For example, a cytoplasmic scFv antibody has been employed for modulating activity of the phytochrome A protein in genetically modified tobacco plants [Owen M et al. (1992) Biotechnology (NY) 10(7): 790-794; Franken E et al. (1997) Curr. Opin. Biotechnol. 8(4): 411-416; Whitelam (1996) Trend Plant Sci. 1: 286-272].

[0408] An “antisense” nucleic acid molecule comprises a nucleotide sequence, which is complementary to a “sense” nucleic acid molecule encoding a protein, e.g., complementary to the coding strand of a double-stranded cDNA molecule or complementary to an encoding mRNA sequence. Accordingly, an antisense nucleic acid molecule can bond via hydrogen bonds to a sense nucleic acid molecule. The antisense nucleic acid molecule can be complementary to an entire coding strand of a nucleic acid molecule conferring the expression of the polypeptide of the invention or used in the process of the present invention, as the nucleic acid molecule of the invention coding strand, or to only a portion thereof. Accordingly, an antisense nucleic acid molecule can be antisense to a “coding region” of the coding strand of a nucleotide sequence of a nucleic acid molecule of the present invention. The term “coding region” refers to the region of the nucleotide sequence comprising codons, which are translated into amino acid residues. Further, the antisense nucleic acid molecule is antisense to a “noncoding region” of the coding strand of a nucleotide sequence encoding the polypeptide of the invention or a polypeptide used in the process of the invention. The term “noncoding region” refers to 5′ and 3′ sequences which flank the coding region that are not translated into a polypeptide, i.e., also referred to as 5′ and 3′ untranslated regions (5′-UTR or 3′-UTR).

[0409] Given the coding strand sequences encoding the polypeptide of the present invention antisense nucleic acid molecules of the invention can be designed according to the rules of Watson and Crick base pairing.

[0410] The antisense nucleic acid molecule can be complementary to the entire coding region of the mRNA encoding the nucleic acid molecule ot the invention or used in the process of the present invention, but can also be an oligonucleotide which is antisense to only a portion of the coding or noncoding region of said mRNA. For example, the antisense oligonucleotide can be complementary to the region surrounding the translation start site of said mRNA. An antisense oligonucleotide can be, for example, about 5, 10, 15, 20, 25, 30, 35, 40, 45, 50, 100 or 200 nucleotides in length. An antisense nucleic acid molecule of the invention can be constructed using chemical synthesis and enzymatic ligation reactions using procedures known in the art. For example, an antisense nucleic acid molecule (e.g., an antisense oligonucleotide) can be chemically synthesized using naturally occurring nucleotides or variously modified nucleotides designed to increase the biological stability of the molecules or to increase the physical stability of the duplex formed between the antisense and sense nucleic acids, e.g., phosphorothioate derivatives and acridine substituted nucleotides can be used. Examples of modified nucleotides which can be used to generate the antisense nucleic acid include 5-fluorouracil, 5-bromouracil, 5-chlorouracil, 5-iodouracil, hypoxanthine, xanthine, 4-acetylcytosine, 5-(carboxyhydroxylmethyl) uracil, 5-carboxymethylaminomethyl-2-thiouridine, 5-carboxymethylaminomethyluracil, dihydrouracil, beta-D-galactosylqueosine, inosine, N6-isopentenyladenine, 1-methylguanine, 1-methylinosine, 2,2-dimethylguanine, 2-methyladenine, 2-methylguanine, 3-methylcytosine, 5-methylcytosine, N6-adenine, 7-methylguanine, 5-methylaminomethyluracil, 5-methoxyaminomethyl-2-thiouracil, beta-D-mannosylqueosine, 5′-methoxycarboxymethyluracil, 5-methoxyuracil, 2-methylthio-N6-isopentenyladenine, uracil-5-oxyacetic acid (v), wybutoxosine, pseudouracil, queosine, 2-thiocytosine, 5-methyl-2-thiouracil, 2-thiouracil, 4-thiouracil, 5-methyluracil, uracil-5-oxyacetic acid methylester, uracil-5-oxyacetic acid (v), 5-methyl-2-thiouracil, 3-(3-amino-3-N-2-carboxypropyl) uracil, (acp3)w, and 2,6-diaminopurine. Alternatively, the antisense nucleic acid can be produced biologically using an expression vector into which a nucleic acid molecule has been subcloned in an antisense orientation (i.e., RNA transcribed from the inserted nucleic acid molecule will be of an antisense orientation to a target nucleic acid molecule of interest, described further in the following subsection).

[0411] The antisense nucleic acid molecules of the invention are typically administered to a cell or generated in situ such that they hybridize with or bind to cellular mRNA and/or genomic DNA encoding a polypeptide of the invention having aforementioned the fine chemical increasing activity to thereby inhibit expression of the protein, e.g., by inhibiting transcription and/or translation.

[0412] The hybridization can be by conventional nucleotide complementarity to form a stable duplex, or, for example, in the case of an antisense nucleic acid molecule which binds to DNA duplexes, through specific interactions in the major groove of the double helix. The antisense nucleic acid molecule can also be delivered to cells using the vectors described herein. To achieve sufficient intracellular concentrations of the antisense molecules, vector in which the antisense nucleic acid molecule is placed under the control of a strong prokaryotic, viral, or eukaryotic including plant promoters are preferred.

[0413] In a further embodiment, the antisense nucleic acid molecule of the invention can be an α-anomeric nucleic acid molecule. A α-anomeric nucleic acid molecule forms specific double-stranded hybrids with complementary RNA in which, contrary to the usual units, the strands run parallel to each other (Gaultier et al. (1987) Nucleic Acids. Res. 15:6625-6641). The antisense nucleic acid molecule can also comprise a 2′-o-methylribonucleotide (Inoue et al. (1987) Nucleic Acids Res. 15:6131-6148) or a chimeric RNA-DNA analogue (Inoue et al. (1987) FEBS Lett. 215:327-330).

[0414] Further the antisense nucleic acid molecule of the invention can be also a ribozyme. Ribozymes are catalytic RNA molecules with ribonuclease activity, which are capable of cleaving a single-stranded nucleic acid, such as an mRNA, to which they have a complementary region. Thus, ribozymes (e.g., hammerhead ribozymes (described in Haselhoff and Gerlach (1988) Nature 334:585-591)) can be used to catalytically cleave mRNA transcripts encoding the polypeptide of the invention to thereby inhibit translation of said mRNA. A ribozyme having specificity for a nucleic acid molecule encoding the polypeptide of the invention or used in the process of the invention can be designed based upon the nucleotide sequence of the nucleic acid molecule of the invention or coding a protein used in the process of the invention or on the basis of a heterologous sequence to be isolated according to methods taught in this invention. For example, a derivative of a Tetrahymena L-19 IVS RNA can be constructed in which the nucleotide sequence of the active site is complementary to the nucleotide sequence to be cleaved in an encoding mRNA. See, e.g., Cech et al. U.S. Pat. No. 4,987,071 and Cech et al. U.S. Pat. No. 5,116,742. Alternatively, mRNA encoding the polypeptide of the invention or a polypeptide used in the process of the invention can be used to select a catalytic RNA having a specific ribonuclease activity from a pool of RNA molecules. See, e.g., Bartel, D. and Szostak, J. W. (1993) Science 261:1411-1418.

[0415] The antisense molecule of the present invention comprises also a nucleic acid molecule comprising a nucleotide sequences complementary to the regulatory region of an nucleotide sequence encoding the natural occurring polypeptide of the invention, e.g. the polypeptide sequences shown in the sequence listing, or identified according to the methods described herein, e.g., its promoter and/or enhancers, e.g. to form triple helical structures that prevent transcription of the gene in target cells. See generally, Helene, C. (1991) Anticancer Drug Des. 6(6): 569-84; Helene, C. et al. (1992) Ann. N.Y. Acad. Sci. 660:27-36; and Maher, L. J. (1992) Bioassays 14(12):807-15.

[0416] Furthermore the present invention relates to a double stranded RNA molecule capable for the reduction or inhibition of the activity of the gene product of a gene encoding the polypeptide of the invention, a polypeptide used in the process of the invention, the nucleic acid molecule of the invention or a nucleic acid molecule used in the process of the invention encoding.

[0417] The method of regulating genes by means of double-stranded RNA (“double-stranded RNA interference”; dsRNAi) has been described extensively for animal, yeast, fungi and plant organisms such as Neurospora, zebrafish, Drosophila, mice, planaria, humans, Trypanosoma, petunia or Arabidopsis (for example Matzke M A et al. (2000) Plant Mol. Biol. 43: 401-415; Fire A. et al. (1998) Nature 391: 806-811; WO 99/32619; WO 99/53050; WO 00/68374; WO 00/44914; WO 00/44895; WO 00/49035; WO 00/63364). In addition RNAi is also documented as an advantageously tool for the repression of genes in bacteria such as E. coli for example by Tchurikov et al. [J. Biol. Chem., 2000, 275 (34): 26523-26529]. Fire et al. named the phenomenon RNAi for “RNA interference”. The techniques and methods described in the above references are expressly referred to. Efficient gene suppression can also be observed in the case of transient expression or following transient transformation, for example as the consequence of a biolistic transformation (Schweizer P et al. (2000) Plant J 2000 24: 895-903). dsRNAi methods are based on the phenomenon that the simultaneous introduction of complementary strand and counterstrand of a gene transcript brings about highly effective suppression of the expression of the gene in question. The resulting phenotype is very similar to that of an analogous knock-out mutant (Waterhouse P M et al. (1998) Proc. Natl. Acad. Sci. USA 95: 13959-64).

[0418] Tuschl et al. [Gens Dev., 1999, 13 (24): 3191-3197] was able to show that the efficiency of the RNAi method is a function of the length of the duplex, the length of the 3′-end overhangs, and the sequence in these overhangs. Based on the work of Tuschl et al. the following guidelines can be given to the skilled worker: To achieve good results the 5′ and 3′ untranslated regions of the used nucleic acid sequence and regions close to the start codon should be avoided as this regions are richer in regulatory protein binding sites and interactions between RNAi sequences and such regulatory proteins might lead to undesired interactions. Preferably a region of the used mRNA is selected, which is 50 to 100 nt (=nucleotides or bases) downstream of the AUG start codon. Only dsRNA (=double-stranded RNA) sequences from exons are useful for the method, as sequences from introns have no effect. The G/C content in this region should be greater than 30% and less than 70% ideally around 50%. A possible secondary structure of the target mRNA is less important for the effect of the RNAi method.

[0419] The dsRNAi method has proved to be particularly effective and advantageous for reducing the expression of the nucleic acid sequences of the SEQ ID NO: 1, 3, 5, 7, 9, 11, 13, 15, 17, 19, 21, 23, 25, 27, 29, 31, 33, 35, 37, 39, 41, 43, 45, 55, 57, 59, 61, 63, 65, 67, 69, 71, 73, 75, 77, 79, 81, 83, 85, 87, 89, 91, 93, 95, 97, 99, 101, 103, 105, 107, 109, 111, 113, 115, 117, 119, 121, 123, 125, 127, 129, 131, 133, 135, 137, 139, 141, 143, 145, 147, 149, 151, 153, 155, 157, 159, 161, 163, 165, 167, 169, 171, 173, 175, 177, 179, 181, 183, 185, 187, 189, 191, 193, 195, 197, 199, 201, 203, 205, 207, 209, 211, 213, 215, 217, 219, 221, 223, 225, 227, 229, 231, 233, 235, 237, 239, 241, 243, 245, 247, 249, 251, 253, 255, 257, 259, 261, 263, 265, 267, 269, 271, 273, 275, 277, 279, 281, 283, 285, 287, 289, 291, 293, 295, 297, 299, 301, 303, 305, 307, 309, 311, 313, 315, 317, 319, 321, 323, 325, 327, 329, 331, 333, 335, 337, 339, 341, 343, 345, 347, 349, 351, 353, 355, 357, 359, 361, 363, 365, 367, 369, 371, 373, 375, 377, 379, 381, 383, 385, 387, 389, 391 or 393 and/or homologs thereof. As described inter alia in WO 99/32619, dsRNAi approaches are clearly superior to traditional antisense approaches. The invention therefore furthermore relates to double-stranded RNA molecules (dsRNA molecules) which, when introduced into an organism, advantageously into a plant (or a cell, tissue, organ or seed derived therefrom), bring about altered metabolic activity by the reduction in the expression of the nucleic acid sequences of the SEQ ID NO: 1, 3, 5, 7, 9, 11, 13, 15, 17, 19, 21, 23, 25, 27, 29, 31, 33, 35, 37, 39, 41, 43, 45, 55, 57, 59, 61, 63, 65, 67, 69, 71, 73, 75, 77, 79, 81, 83, 85, 87, 89, 91, 93, 95, 97, 99, 101, 103, 105, 107, 109, 111, 113, 115, 117, 119, 121, 123, 125, 127, 129, 131, 133, 135, 137, 139, 141, 143, 145, 147, 149, 151, 153, 155, 157, 159, 161, 163, 165, 167, 169, 171, 173, 175, 177, 179, 181, 183, 185, 187, 189, 191, 193, 195, 197, 199, 201, 203, 205, 207, 209, 211, 213, 215, 217, 219, 221, 223, 225, 227, 229, 231, 233, 235, 237, 239, 241, 243, 245, 247, 249, 251, 253, 255, 257, 259, 261, 263, 265, 267, 269, 271, 273, 275, 277, 279, 281, 283, 285, 287, 289, 291, 293, 295, 297, 299, 301, 303, 305, 307, 309, 311, 313, 315, 317, 319, 321, 323, 325, 327, 329, 331, 333, 335, 337, 339, 341, 343, 345, 347, 349, 351, 353, 355, 357, 359, 361, 363, 365, 367, 369, 371, 373, 375, 377, 379, 381, 383, 385, 387, 389, 391 or 393 and/or homologs thereof. In a double-stranded RNA molecule for reducing the expression of an protein encoded by a nucleic acid sequence of one of the SEQ ID NO: 1, 3, 5, 7, 9, 11, 13, 15, 17, 19, 21, 23, 25, 27, 29, 31, 33, 35, 37, 39, 41, 43, 45, 55, 57, 59, 61, 63, 65, 67, 69, 71, 73, 75, 77, 79, 81, 83, 85, 87, 89, 91, 93, 95, 97, 99, 101, 103, 105, 107, 109, 111, 113, 115, 117, 119, 121, 123, 125, 127, 129, 131, 133, 135, 137, 139, 141, 143, 145, 147, 149, 151, 153, 155, 157, 159, 161, 163, 165, 167, 169, 171, 173, 175, 177, 179, 181, 183, 185, 187, 189, 191, 193, 195, 197, 199, 201, 203, 205, 207, 209, 211, 213, 215, 217, 219, 221, 223, 225, 227, 229, 231, 233, 235, 237, 239, 241, 243, 245, 247, 249, 251, 253, 255, 257, 259, 261, 263, 265, 267, 269, 271, 273, 275, 277, 279, 281, 283, 285, 287, 289, 291, 293, 295, 297, 299, 301, 303, 305, 307, 309, 311, 313, 315, 317, 319, 321, 323, 325, 327, 329, 331, 333, 335, 337, 339, 341, 343, 345, 347, 349, 351, 353, 355, 357, 359, 361, 363, 365, 367, 369, 371, 373, 375, 377, 379, 381, 383, 385, 387, 389, 391 or 393 and/or homologs thereof, one of the two RNA strands is essentially identical to at least part of a nucleic acid sequence, and the respective other RNA strand is essentially identical to at least part of the complementary strand of a nucleic acid sequence.

[0420] The term “essentially identical” refers to the fact that the dsRNA sequence may also include insertions, deletions and individual point mutations in comparison to the target sequence while still bringing about an effective reduction in expression. Preferably, the homology as defined above amounts to at least 30%, preferably at least 40%, 50%, 60%, 70% or 80%, very especially preferably at least 90%, most preferably 100%, between the “sense” strand of an inhibitory dsRNA and a part-segment of a nucleic acid sequence of the invention (or between the “antisense” strand and the complementary strand of a nucleic acid sequence, respectively). The part-segment amounts to at least 10 bases, preferably at least 17, 18, 19, 20, 21, 22, 23, 24, 25, 26, 27, 28, 29 or 30 bases, especially preferably at least 40, 50, 60, 70, 80 or 90 bases, very especially preferably at least 100, 200, 300 or 400 bases, most preferably at least 500, 600, 700, 800, 900 or more bases or at least 1000 or 2000 bases or more in length. In another preferred embodiment of the invention the part-segment amounts to 17, 18, 19, 20, 21, 22, 23, 24, 25, 26 or 27 bases, preferably to 20, 21, 22, 23, 24 or 25 bases. These short sequences are preferred in animals and plants. The longer sequences preferably between 200 and 800 bases are preferred in nonmammalian animals, preferably in invertebrates, in yeast, fungi or bacteria, but they are also useable in plants. Long double-stranded RNAs are processed in the organisms into many siRNAs (=small/short interfering RNAs) for example by the protein Dicer, which is a ds-specific Rnase III enzyme. As an alternative, an “essentially identical” dsRNA may also be defined as a nucleic acid sequence, which is capable of hybridizing with part of a gene transcript (for example in 400 mM NaCl, 40 mM PIPES pH 6.4, 1 mM EDTA at 50° C. or 70° C. for 12 to 16 h).

[0421] The dsRNA may consist of one or more strands of polymerized ribonucleotides. Modification of both the sugar-phosphate backbone and of the nucleosides may furthermore be present. For example, the phosphodiester bonds of the natural RNA can be modified in such a way that they encompass at least one nitrogen or sulfur heteroatom. Bases may undergo modification in such a way that the activity of, for example, adenosine deaminase is restricted. These and other modifications are described herein below in the methods for stabilizing antisense RNA.

[0422] The dsRNA can be prepared enzymatically; it may also be synthesized chemically, either in full or in part.

[0423] The double-stranded structure can be formed starting from a single, self-complementary strand or starting from two complementary strands. In a single, self-complementary strand, “sense” and “antisense” sequence can be linked by a linking sequence (“linker”) and form for example a hairpin structure. Preferably, the linking sequence may take the form of an intron, which is spliced out following dsRNA synthesis. The nucleic acid sequence encoding a dsRNA may contain further elements such as, for example, transcription termination signals or polyadenylation signals. If the two strands of the dsRNA are to be combined in a cell or an organism advantageously in a plant, this can be brought about in a variety of ways.

[0424] Formation of the RNA duplex can be initiated either outside the cell or within the cell. As shown in WO 99/53050, the dsRNA may also encompass a hairpin structure, by linking the “sense” and “antisense” strands by a “linker” (for example an intron). The self-complementary dsRNA structures are preferred since they merely require the expression of a construct and always encompass the complementary strands in an equimolar ratio.

[0425] The expression cassettes encoding the “antisense” or the “sense” strand of the dsRNA or the self-complementary strand of the dsRNA are preferably inserted into a vector and stably inserted into the genome of a plant, using the methods described herein below (for example using selection markers), in order to ensure permanent expression of the dsRNA.

[0426] The dsRNA can be introduced using an amount which makes possible at least one copy per cell. A larger amount (for example at least 5, 10, 100, 500 or 1000 copies per cell) may bring about more efficient reduction.

[0427] As has already been described, 100% sequence identity between the dsRNA and a gene transcript of a nucleic acid sequence of one of the SEQ ID NO: 1, 3, 5, 7, 9, 11, 13, 15, 17, 19, 21, 23, 25, 27, 29, 31, 33, 35, 37, 39, 41, 43, 45, 55, 57, 59, 61, 63, 65, 67, 69, 71, 73, 75, 77, 79, 81, 83, 85, 87, 89, 91, 93, 95, 97, 99, 101, 103, 105, 107, 109, 111, 113, 115, 117, 119, 121, 123, 125, 127, 129, 131, 133, 135, 137, 139, 141, 143, 145, 147, 149, 151, 153, 155, 157, 159, 161, 163, 165, 167, 169, 171, 173, 175, 177, 179, 181, 183, 185, 187, 189, 191, 193, 195, 197, 199, 201, 203, 205, 207, 209, 211, 213, 215, 217, 219, 221, 223, 225, 227, 229, 231, 233, 235, 237, 239, 241, 243, 245, 247, 249, 251, 253, 255, 257, 259, 261, 263, 265, 267, 269, 271, 273, 275, 277, 279, 281, 283, 285, 287, 289, 291, 293, 295, 297, 299, 301, 303, 305, 307, 309, 311, 313, 315, 317, 319, 321, 323, 325, 327, 329, 331, 333, 335, 337, 339, 341, 343, 345, 347, 349, 351, 353, 355, 357, 359, 361, 363, 365, 367, 369, 371, 373, 375, 377, 379, 381, 383, 385, 387, 389, 391 or 393 or it's homolog is not necessarily required in order to bring about effective reduction in the expression. The advantage is, accordingly, that the method is tolerant with regard to sequence deviations as may be present as a consequence of genetic mutations, polymorphisms or evolutionary divergences. Thus, for example, using the dsRNA, which has been generated starting from a sequence of one of SEQ ID NO: 1, 3, 5, 7, 9, 11, 13, 15, 17, 19, 21, 23, 25, 27, 29, 31, 33, 35, 37, 39, 41, 43, 45, 55, 57, 59, 61, 63, 65, 67, 69, 71, 73, 75, 77, 79, 81, 83, 85, 87, 89, 91, 93, 95, 97, 99, 101, 103, 105, 107, 109, 111, 113, 115, 117, 119, 121, 123, 125, 127, 129, 131, 133, 135, 137, 139, 141, 143, 145, 147, 149, 151, 153, 155, 157, 159, 161, 163, 165, 167, 169, 171, 173, 175, 177, 179, 181, 183, 185, 187, 189, 191, 193, 195, 197, 199, 201, 203, 205, 207, 209, 211, 213, 215, 217, 219, 221, 223, 225, 227, 229, 231, 233, 235, 237, 239, 241, 243, 245, 247, 249, 251, 253, 255, 257, 259, 261, 263, 265, 267, 269, 271, 273, 275, 277, 279, 281, 283, 285, 287, 289, 291, 293, 295, 297, 299, 301, 303, 305, 307, 309, 311, 313, 315, 317, 319, 321, 323, 325, 327, 329, 331, 333, 335, 337, 339, 341, 343, 345, 347, 349, 351, 353, 355, 357, 359, 361, 363, 365, 367, 369, 371, 373, 375, 377, 379, 381, 383, 385, 387, 389, 391 or 393 or homologs thereof of the one organism, may be used to suppress the corresponding expression in another organism.

[0428] Due to the high degree of sequence homology between sequences from various organisms (e.g. plants), allows the conclusion that these proteins may be conserved to a high degree within, for example other, plants, it is optionally possible that the expression of a dsRNA derived from one of the disclosed sequences as shown herein or homologs thereof should also have has an advantageous effect in other plant species. Preferably the consensus sequences shown herein can be used for the construction of useful dsRNA molecules.

[0429] The dsRNA can be synthesized either in vivo or in vitro. To this end, a DNA sequence encoding a dsRNA can be introduced into an expression cassette under the control of at least one genetic control element (such as, for example, promoter, enhancer, silencer, splice donor or splice acceptor or polyadenylation signal). Suitable advantageous constructs are described herein below. Polyadenylation is not required, nor do elements for initiating translation have to be present.

[0430] A dsRNA can be synthesized chemically or enzymatically. Cellular RNA polymerases or bacteriophage RNA polymerases (such as, for example T3, T7 or SP6 RNA polymerase) can be used for this purpose. Suitable methods for the in-vitro expression of RNA are described (WO 97/32016; U.S. Pat. No. 5,593,874; U.S. Pat. No. 5,698,425, U.S. Pat. No. 5,712,135, U.S. Pat. No. 5,789,214, U.S. Pat. No. 5,804,693). Prior to introduction into a cell, tissue or organism, a dsRNA which has been synthesized in vitro either chemically or enzymatically can be isolated to a higher or lesser degree from the reaction mixture, for example by extraction, precipitation, electrophoresis, chromatography or combinations of these methods. The dsRNA can be introduced directly into the cell or else be applied extracellularly (for example into the interstitial space).

[0431] Advantageously the RNAi method leads to only a partial loss of gene function and therefore enables the skilled worker to study a gene dose effect in the disered organism and to fine tune the process of the invention. Futhermore it enables a person skilled in the art to study multiple functions of a gene.

[0432] Stable transformation of the plant with an expression construct, which brings about the expression of the dsRNA is preferred, however. Suitable methods are described herein below.

[0433] A further embodiment of the invention also relates to a method for the generation of a transgenic host or host cell, e.g. a eukaryotic or prokaryotic cell, preferably a transgenic microorganism, a transgenic plant cell or a transgenic plant tissue or a transgenic plant, which comprises introducing, into the plant, the plant cell or the plant tissue, the nucleic acid construct according to the invention, the vector according to the invention, or the nucleic acid molecule according to the invention.

[0434] A further embodiment of the invention also relates to a method for the transient generation of a host or host cell, eukaryotic or prokaryotic cell, preferably a transgenic microorganism, a transgenic plant cell or a transgenic plant tissue or a transgenic plant, which comprises introducing, into the plant, the plant cell or the plant tissue, the nucleic acid construct according to the invention, the vector according to the invention, the nucleic acid molecule characterized herein as being contained in the nucleic acid construct of the invention or the nucleic acid molecule according to the invention, whereby the introduced nucleic acid molecules, nucleic acid construct and/or vector is not integrated into the genome of the host or host cell. Therefore the transformants are not stable during the propagation of the host in respect of the introduced nucleic acid molecules, nucleic acid construct and/or vector.

[0435] In the process according to the invention, transgenic organisms are also to be understood as meaning—if they take the form of plants—plant cells, plant tissues, plant organs such as root, shoot, stem, seed, flower, tuber or leaf, or intact plants which are grown for the production of the fine chemical.

[0436] Growing is to be understood as meaning for example culturing the transgenic plant cells, plant tissue or plant organs on or in a nutrient medium or the intact plant on or in a substrate, for example in hydroponic culture, potting compost or on a field soil.

[0437] In a further advantageous embodiment of the process, the nucleic acid molecules can be expressed in single-celled plant cells (such as algae), see Falciatore et al., 1999, Marine Biotechnology 1 (3): 239-251 and references cited therein, and plant cells from higher plants (for example spermatophytes such as crops). Examples of plant expression vectors encompass those which are described in detail herein or in: Becker, D. [(1992) Plant Mol. Biol. 20:1195-1197] and Bevan, M. W. [(1984), Nucl. Acids Res. 12:8711-8721; Vectors for Gene Transfer in Higher Plants; in: Transgenic Plants, Vol. 1, Engineering and Utilization, Ed.: Kung and R. Wu, Academic Press, 1993, pp. 15-38]. An overview of binary vectors and their use is also found in Hellens, R. [(2000), Trends in Plant Science, Vol. 5 No. 10, 446-451.

[0438] Vector DNA can be introduced into prokaryotic or eukaryotic cells via conventional transformation or transfection techniques. The terms “transformation” and “transfection” include conjugation and transduction and, as used in the present context, are intended to encompass a multiplicity of prior-art methods for introducing foreign nucleic acid molecules (for example DNA) into a host cell, including calcium phosphate coprecipitation or calcium chloride coprecipitation, DEAE-dextran-mediated transfection, PEG-mediated transfection, lipofection, natural competence, chemically mediated transfer, electroporation or particle bombardment. Suitable methods for the transformation or transfection of host cells, including plant cells, can be found in Sambrook et al. (Molecular Cloning: A Laboratory Manual., 2nd Ed., Cold Spring Harbor Laboratory, Cold Spring Harbor Laboratory Press, Cold Spring Harbor, N.Y., 1989) and in other laboratory handbooks such as Methods in Molecular Biology, 1995, Vol. 44, Agrobacterium protocols, Ed.: Gartland and Davey, Humana Press, Totowa, N.J.

[0439] The above-described methods for the transformation and regeneration of plants from plant tissues or plant cells are exploited for transient or stable transformation of plants. Suitable methods are the transformation of protoplasts by polyethylene-glycol-induced DNA uptake, the biolistic method with the gene gun—known as the particle bombardment method—, electroporation, the incubation of dry embryos in DNA-containing solution, microinjection and the Agrobacterium-mediated gene transfer. The abovementioned methods are described for example in B. Jenes, Techniques for Gene Transfer, in: Transgenic Plants, Vol. 1, Engineering and Utilization, edited by S. D. Kung and R. Wu, Academic Press (1993) 128-143 and in Potrykus Annu. Rev. Plant Physiol. Plant Molec. Biol. 42 (1991) 205-225. The construct to be expressed is preferably cloned into a vector, which is suitable for transforming Agrobacterium tumefaciens, for example pBin19 (Bevan, Nucl. Acids Res. 12 (1984) 8711). Agrobacteria transformed with such a vector can then be used in the known manner for the transformation of plants, in particular crop plants, such as, for example, tobacco plants, for example by bathing scarified leaves or leaf segments in an agrobacterial solution and subsequently culturing them in suitable media. The transformation of plants with Agrobacterium tumefaciens is described for example by Höfgen and Willmitzer in Nucl. Acid Res. (1988) 16, 9877 or known from, inter alia, F. F. White, Vectors for Gene Transfer in Higher Plants; in Transgenic Plants, Vol. 1, Engineering and Utilization, edited by S. D. Kung and R. Wu, Academic Press, 1993, pp. 15-38.

[0440] To select for the successful transfer of the nucleic acid molecule, vector or nucleic acid construct of the invention according to the invention into a host organism, it is advantageous to use marker genes as have already been described above in detail. It is known of the stable or transient integration of nucleic acids into plant cells that only a minority of the cells takes up the foreign DNA and, if desired, integrates it into its genome, depending on the expression vector used and the transfection technique used. To identify and select these integrants, a gene encoding for a selectable marker (as described above, for example resistance to antibiotics) is usually introduced into the host cells together with the gene of interest. Preferred selectable markers in plants comprise those, which confer resistance to an herbicide such as glyphosate or gluphosinate. Other suitable markers are, for example, markers, which encode genes involved in biosynthetic pathways of, for example, sugars or amino acids, such as β-galactosidase, ura3 or ilv2. Markers, which encode genes such as luciferase, gfp or other fluorescence genes, are likewise suitable. These markers and the aforementioned markers can be used in mutants in whom these genes are not functional since, for example, they have been deleted by conventional methods. Furthermore, nucleic acid molecules, which encode a selectable marker, can be introduced into a host cell on the same vector as those, which encode the polypeptides of the invention or used in the process or else in a separate vector. Cells which have been transfected stably with the nucleic acid introduced can be identified for example by selection (for example, cells which have integrated the selectable marker survive whereas the other cells die).

[0441] Since the marker genes, as a rule specifically the gene for resistance to antibiotics and herbicides, are no longer required or are undesired in the transgenic host cell once the nucleic acids have been introduced successfully, the process according to the invention for introducing the nucleic acids advantageously employs techniques which enable the removal, or excision, of these marker genes. One such a method is what is known as cotransformation. The cotransformation method employs two vectors simultaneously for the transformation, one vector bearing the nucleic acid according to the invention and a second bearing the marker gene(s). A large proportion of transformants receives or, in the case of plants, comprises (up to 40% of the transformants and above), both vectors. In case of transformation with Agrobacteria, the transformants usually receive only a part of the vector, the sequence flanked by the T-DNA which usually represents the expression cassette. The marker genes can subsequently be removed from the transformed plant by performing crosses. In another method, marker genes integrated into a transposon are used for the transformation together with desired nucleic acid (known as the Ac/Ds technology). The transformants can be crossed with a transposase resource or the transformants are transformed with a nucleic acid construct conferring expression of a transposase, transiently or stable. In some cases (approx. 10%), the transposon jumps out of the genome of the host cell once transformation has taken place successfully and is lost. In a further number of cases, the transposon jumps to a different location. In these cases, the marker gene must be eliminated by performing crosses. In microbiology, techniques were developed which make possible, or facilitate, the detection of such events. A further advantageous method relies on what are known as recombination systems, whose advantage is that elimination by crossing can be dispensed with. The best-known system of this type is what is known as the Cre/lox system. Cre1 is a recombinase, which removes the sequences located between the loxP sequences. If the marker gene is integrated between the loxP sequences, it is removed, once transformation has taken place successfully, by expression of the recombinase. Further recombination systems are the HIN/HIX, FLP/FRT and REP/STB system (Tribble et al., J. Biol. Chem., 275, 2000: 22255-22267; Velmurugan et al., J. Cell Biol., 149, 2000: 553-566). A site-specific integration into the plant genome of the nucleic acid sequences according to the invention is possible. Naturally, these methods can also be applied to microorganisms such as yeast, fungi or bacteria.

[0442] Agrobacteria transformed with an expression vector according to the invention may also be used in the manner known per se for the transformation of plants such as experimental plants like Arabidopsis or crop plants, such as, for example, cereals, maize, oats, rye, barley, wheat, soya, rice, cotton, sugarbeet, canola, sunflower, flax, hemp, potato, tobacco, tomato, carrot, bell peppers, oilseed rape, tapioca, cassava, arrow root, tagetes, alfalfa, lettuce and the various tree, nut, and grapevine species, in particular oil-containing crop plants such as soya, peanut, castor-oil plant, sunflower, maize, cotton, flax, oilseed rape, coconut, oil palm, safflower (Carthamus tinctorius) or cocoa beans, for example by bathing scarified leaves or leaf segments in an agrobacterial solution and subsequently growing them in suitable media.

[0443] In addition to the transformation of somatic cells, which then has to be regenerated into intact plants, it is also possible to transform the cells of plant meristems and in particular those cells which develop into gametes. In this case, the transformed gametes follow the natural plant development, giving rise to transgenic plants. Thus, for example, seeds of Arabidopsis are treated with agrobacteria and seeds are obtained from the developing plants of which a certain proportion is transformed and thus transgenic (Feldman, K A and Marks M D (1987). Mol Gen Genet 208:274-289; Feldmann K (1992). In: C Koncz, N-H Chua and J. Shell, eds, Methods in Arabidopsis Research. Word Scientific, Singapore, pp. 274-289). Alternative methods are based on the repeated removal of the influorescences and incubation of the excision site in the center of the rosette with transformed agrobacteria, whereby transformed seeds can likewise be obtained at a later point in time (Chang (1994). Plant J. 5: 551-558; Katavic (1994). Mol Gen Genet, 245: 363-370). However, an especially effective method is the vacuum infiltration method with its modifications such as the “floral dip” method. In the case of vacuum infiltration of Arabidopsis, intact plants under reduced pressure are treated with an agrobacterial suspension (Bechthold, N (1993). C R Acad Sci Paris Life Sci, 316: 1194-1199), while in the case of the “floral dip” method the developing floral tissue is incubated briefly with a surfactant-treated agrobacterial suspension (Clough, S J und Bent, A F (1998). The Plant J. 16, 735-743). A certain proportion of transgenic seeds are harvested in both cases, and these seeds can be distinguished from nontransgenic seeds by growing under the above-described selective conditions. In addition the stable transformation of plastids is of advantages because plastids are inherited maternally is most crops reducing or eliminating the risk of transgene flow through pollen. The transformation of the chloroplast genome is generally achieved by a process, which has been schematically displayed in Klaus et al., 2004 (Nature Biotechnology 22(2), 225-229). Briefly the sequences to be transformed are cloned together with a selectable marker gene between flanking sequences homologous to the chloroplast genome. These homologous flanking sequences direct site-specific integration into the plastome. Plastidal transformation has been described for many different plant species and an overview can be taken from Bock (2001) Transgenic plastids in basic research and plant biotechnology. J Mol Biol. 2001 Sep. 21; 312(3): 425-38 or Maliga, P (2003) Progress towards commercialization of plastid transformation technology. Trends Biotechnol. 21, 20-28. Further biotechnological progress has recently been reported in form of marker free plastid transformants, which can be produced by a transient cointegrated maker gene (Klaus et al., 2004, Nature Biotechnology 22(2), 225-229).

[0444] The genetically modified plant cells can be regenerated via all methods with which the skilled worker is familiar. Suitable methods can be found in the abovementioned publications of S. D. Kung and R. Wu, Potrykus or Höfgen and Willmitzer.

[0445] Accordingly, the present invention thus also relates to a plant cell comprising the nucleic acid construct according to the invention, the nucleic acid molecule according to the invention or the vector according to the invention.

[0446] Accordingly the present invention relates to any cell transgenic for any nucleic acid characterized as part of the invention, e.g. conferring the increase of the fine chemical in a cell or an organism or a part thereof, e.g. the nucleic acid molecule of the invention, the nucleic acid construct of the invention, the antisense molecule of the invention, the vector of the invention or a nucleic acid molecule encoding the polypeptide of the invention, e.g. encoding a polypeptide having the biological activity of the protein of the invention. Due to the above mentioned activity the fine chemical content in a cell or an organism is increased. For example, due to modulation or manupulation, the cellular activity is increased, e.g. due to an increased expression or specific activity of the subject matters of the invention in a cell or an organism or a part thereof. Transgenic for a polypeptide having biological activity of the protein of the invention or activity means herein that due to modulation or manipulation of the genome, the biological activity of the protein of the invention is increased in the cell or organism or part thereof. Examples are described above in context with the process of the invention

[0447] “Transgenic”, for example regarding a nucleic acid molecule, an nucleic acid construct or a vector comprising said nucleic acid molecule or an organism transformed with said nucleic acid molecule, nucleic acid construct or vector, refers to all those subjects originating by recombinant methods in which either
[0448] a) the nucleic acid sequence, or
[0449] b) a genetic control sequence linked operably to the nucleic acid sequence, for example a promoter, or
[0450] c) (a) and (b)
   are not located in their natural genetic environment or have been modified by recombinant methods, an example of a modification being a substitution, addition, deletion, inversion or insertion of one or more nucleotide residues. Natural genetic environment refers to the natural chromosomal locus in the organism of origin, or to the presence in a genomic library. In the case of a genomic library, the natural genetic environment of the nucleic acid sequence is preferably retained, at least in part. The environment flanks the nucleic acid sequence at least at one side and has a sequence of at least 50 bp, preferably at least 500 bp, especially preferably at least 1000 bp, very especially preferably at least 5000 bp, in length.

[0451] A naturally occurring expression cassette—for example the naturally occurring combination of the promoter of the protein of the invention with the corresponding protein gene—becomes a transgenic expression cassette when it is modified by non-natural, synthetic “artificial” methods such as, for example, mutagenization. Such methods have been described (U.S. Pat. No. 5,565,350; WO 00/15815; also see above).

[0452] Further, the plant cell, plant tissue or plant can also be transformed such that further enzymes and proteins are (over)expressed which expression supports an increase of the fine chemical.

[0453] However, transgenic also means that the nucleic acids according to the invention are located at their natural position in the genome of an organism, but that the sequence has been modified in comparison with the natural sequence and/or that the regulatory sequences of the natural sequences have been modified. Preferably, transgenic/recombinant is to be understood as meaning the transcription of the nucleic acids used in the process according to the invention occurs at a non-natural position in the genome, that is to say the expression of the nucleic acids is homologous or, preferably, heterologous. This expression can be transiently or of a sequence integrated stably into the genome.

[0454] The term “transgenic plants” used in accordance with the invention also refers to the progeny of a transgenic plant, for example the T₁, T₂, T₃ and subsequent plant generations or the BC₁, BC₂, BC₃ and subsequent plant generations. Thus, the transgenic plants according to the invention can be raised and selfed or crossed with other individuals in order to obtain further transgenic plants according to the invention. Transgenic plants may also be obtained by propagating transgenic plant cells vegetatively. The present invention also relates to transgenic plant material, which can be derived from a transgenic plant population according to the invention. Such material includes plant cells and certain tissues, organs and parts of plants in all their manifestations, such as seeds, leaves, anthers, fibers, tubers, roots, root hairs, stems, embryo, calli, cotelydons, petioles, harvested material, plant tissue, reproductive tissue and cell cultures, which are derived from the actual transgenic plant and/or can be used for bringing about the transgenic plant.

[0455] Any transformed plant obtained according to the invention can be used in a conventional breeding scheme or in in vitro plant propagation to produce more transformed plants with the same characteristics and/or can be used to introduce the same characteristic in other varieties of the same or related species. Such plants are also part of the invention. Seeds obtained from the transformed plants genetically also contain the same characteristic and are part of the invention. As mentioned before, the present invention is in principle applicable to any plant and crop that can be transformed with any of the transformation method known to those skilled in the art. Another embodiment of the invention is the use of the nucleic acid molecule as claimed in above in mapping and breeding processes for the identification of plant varieties having and increased capacity for production of the fine chemical.

[0456] In an especially preferred embodiment, the organism, the host cell, plant cell, plant, microorganism or plant tissue according to the invention is transgenic.

[0457] Accordingly, the invention therefore relates to transgenic organisms transformed with at least one nucleic acid molecule, nucleic acid construct or vector according to the invention, and to cells, cell cultures, tissues, parts—such as, for example, in the case of plant organisms, plant tissue, for example leaves, roots and the like—or propagation material derived from such organisms, or intact plants. The terms “recombinant (host)”, and “transgenic (host)” are used interchangeably in this context. Naturally, these terms refer not only to the host organism or target cell in question, but also to the progeny, or potential progeny, of these organisms or cells. Since certain modifications may occur in subsequent generations owing to mutation or environmental effects, such progeny is not necessarily identical with the parental cell, but still comes within the scope of the term as used herein.

[0458] Suitable organisms for the process according to the invention or as hosts are all these eukaryotic or prokaryotic organisms, which are capable of synthesizing the fine chemcial. The organisms used as hosts are microorganisms, such as bacteria, fungi, yeasts or algae, non-human animals, or plants, such as dictotyledonous or monocotyledonous plants.

[0459] In principle all plants can be used as host organism, especially the plants mentioned above as source organism. Preferred transgenic plants are, for example, selected from the families Aceraceae, Anacardiaceae, Apiaceae, Asteraceae, Brassicaceae, Cactaceae, Cucurbitaceae, Euphorbiaceae, Fabaceae, Malvaceae, Nymphaeaceae, Papaveraceae, Rosaceae, Salicaceae, Solanaceae, Arecaceae, Bromeliaceae, Cyperaceae, Iridaceae, Liliaceae, Orchidaceae, Gentianaceae, Labiaceae, Magnoliaceae, Ranunculaceae, Carifolaceae, Rubiaceae, Scrophulariaceae, Caryophyllaceae, Ericaceae, Polygonaceae, Violaceae, Juncaceae or Poaceae and preferably from a plant selected from the group of the families Apiaceae, Asteraceae, Brassicaceae, Cucurbitaceae, Fabaceae, Papaveraceae, Rosaceae, Solanaceae, Liliaceae or Poaceae. Preferred are crop plants such as plants advantageously selected from the group of the genus peanut, oilseed rape, canola, sunflower, safflower, olive, sesame, hazelnut, almond, avocado, bay, pumpkin/squash, linseed, soya, pistachio, borage, maize, wheat, rye, oats, sorghum and millet, triticale, rice, barley, cassava, potato, sugarbeet, egg plant, alfalfa, and perennial grasses and forage plants, oil palm, vegetables (brassicas, root vegetables, tuber vegetables, pod vegetables, fruiting vegetables, onion vegetables, leafy vegetables and stem vegetables), buckwheat, Jerusalem artichoke, broad bean, vetches, lentil, dwarf bean, lupin, clover and Lucerne for mentioning only some of them.

[0460] Preferred plant cells, plant organs, plant tissues or parts of plants originate from the under source organism mentioned plant families, preferably from the abovementioned plant genus, more preferred from abovementioned plants spezies.

[0461] Transgenic plants comprising the fine chemical synthesized in the process according to the invention can be marketed directly without isolation of the compounds synthesized. In the process according to the invention, plants are understood as meaning all plant parts, plant organs such as leaf, stalk, root, tubers or seeds or propagation material or harvested material or the intact plant. In this context, the seed encompasses all parts of the seed such as the seed coats, epidermal cells, seed cells, endosperm or embryonic tissue. The fine chemical produced in the process according to the invention may, however, also be isolated from the plant in free or bound form. The fine chemical produced by this process can be harvested by harvesting the organisms either from the culture in which they grow or from the field. This can be done via expressing, grinding and/or extraction, salt precipitation and/or ion-exchange chromatography of the plant parts, preferably the plant seeds, plant fruits, plant tubers and the like.

[0462] In a further embodiment, the present invention relates to a process for the generation of a microorganism, comprising the introduction, into the microorganism or parts thereof, of the nucleic acid construct of the invention, or the vector of the invention or the nucleic acid molecule of the invention.

[0463] In another embodiment, the present invention relates also to a transgenic microorganism comprising the nucleic acid molecule of the invention, the nucleic acid construct of the invention or the vector as of the invention. Appropriate microorganisms have been described herein before under source organism, preferred are in particular aforementioned strains suitable for the production of fine chemicals.

[0464] Accordingly, the present invention relates also to a process according to the present invention whereby the produced fine chemical or fine chemical composition is isolated.

[0465] In this manner, more than 50% by weight, advantageously more than 60% by weight, preferably more than 70% by weight, especially preferably more than 80% by weight, very especially preferably more than 90% by weight, of the fine chemical produced in the process can be isolated. The resulting fine chemical can, if appropriate, subsequently be further purified, if desired mixed with other active ingredients such as vitamins, amino acids, carbohydrates, antibiotics and the like, and, if appropriate, formulated.

[0466] The fine chemical obtained in the process is suitable as starting material for the synthesis of further products of value. For example, they can be used in combination with other ingredients or alone for the production of pharmaceuticals, foodstuffs, animal feeds or cosmetics. Accordingly, the present invention relates a method for the production of a pharmaceuticals, food stuff, animal feeds, nutrients or cosmetics comprising the steps of the process according to the invention, including the isolation of the fine chemical or fine chemical composition produced and if desired formulating the product with a pharmaceutical acceptable carrier or formulating the product in a form acceptable for an application in agriculture. A further embodiment according to the invention is the use of the fine chemical produced in the process or of the transgenic organisms in animal feeds, foodstuffs, medicines, food supplements, cosmetics or pharmaceuticals.

[0467] In principle all microorganisms can be used as host organism especially the ones mentioned under source organism above. It is advantageous to use in the process of the invention transgenic microorganisms such as fungi such as the genus Claviceps or Aspergillus or Gram-positive bacteria such as the genera Bacillus, Corynebacterium, Micrococcus, Brevibacterium, Rhodococcus, Nocardia, Caseobacter or Arthrobacter or Gram-negative bacteria such as the genera Escherichia, Flavobacterium or Salmonella or yeasts such as the genera Rhodotorula, Saccharomyces, Hansenula or Candida. Particularly advantageous organisms are selected from the group of genera Corynebacterium, Brevibacterium, Escherichia, Bacillus, Rhodotorula, Saccharomyces, Hansenula, Candida, Claviceps or Flavobacterium. It is very particularly advantageous to use in the process of the invention microorganisms selected from the group of genera and species consisting of Saccharomyces cerevisiae, Hansenula anomala, Candida utilis, Claviceps purpurea, Bacillus circulans, Bacillus subtilis, Bacillus sp., Brevibacterium albidum, Brevibacterium album, Brevibacterium cerinum, Brevibacterium flavum, Brevibacterium glutamigenes, Brevibacterium iodinum, Brevibacterium ketoglutamicum, Brevibacterium lactofermentum, Brevibacterium linens, Brevibacterium roseum, Brevibacterium saccharolyticum, Brevibacterium sp., Corynebacterium acetoacidophilum, Corynebacterium acetoglutamicum, Corynebacterium ammoniagenes, Corynebacterium glutamicum (=Micrococcus glutamicum), Corynebacterium melassecola, Corynebacterium sp. or Escherichia coli, specifically Saccharomyces cerevisiae, Escherichia coli K12 and its described strains.

[0468] The process of the invention is, when the host organisms are microorganisms, advantageously carried out at a temperature between 0° C. and 95° C., preferably between 10° C. and 85° C., particularly preferably between 15° C. and 75° C., very particularly preferably between 15° C. and 45° C. The pH is advantageously kept at between pH 4 and 12, preferably between pH 6 and 9, particularly preferably between pH 7 and 8, during this. The process of the invention can be operated batchwise, semibatchwise or continuously. A summary of known cultivation methods is to be found in the textbook by Chmiel (Bioprozeβtechnik 1. Einführung in die Bioverfahrenstechnik (Gustav Fischer Verlag, Stuttgart, 1991)) or in the textbook by Storhas (Bioreaktoren und periphere Einrichtungen (Vieweg Verlag, Braunschweig/Wiesbaden, 1994)). The culture medium to be used must meet the requirements of the respective strains in a suitable manner. Descriptions of culture media for various microorganisms are present in the handbook “Manual of Methods for General Bacteriology” of the American Society for Bacteriology (Washington D.C., USA, 1981). These media, which can be employed according to the invention include, as described above, usually one or more carbon sources, nitrogen sources, inorganic salts, vitamins and/or trace elements. Preferred carbon sources are sugars such as mono-, di- or polysaccharides. Examples of very good carbon sources are glucose, fructose, mannose, galactose, ribose, sorbose, ribulose, lactose, maltose, sucrose, raffinose, starch or cellulose. Sugars can also be added to the media via complex compounds such as molasses, or other byproducts of sugar refining. It may also be advantageous to add mixtures of various carbon sources. Other possible carbon sources are oils and fats such as, for example, soybean oil, sunflower oil, peanut oil and/or coconut fat, fatty acids such as, for example, palmitic acid, stearic acid and/or linoleic acid, alcohols and/or polyalcohols such as, for example, glycerol, methanol and/or ethanol and/or organic acids such as, for example, acetic acid and/or lactic acid. Nitrogen sources are usually organic or inorganic nitrogen compounds or materials, which contain these compounds. Examples of nitrogen sources include ammonia in liquid or gaseous form or ammonium salts such as ammonium sulfate, ammonium chloride, ammonium phosphate, ammonium carbonate or ammonium nitrate, nitrates, urea, amino acids or complex nitrogen sources such as corn steep liquor, soybean meal, soybean protein, yeast extract, meat extract and others. The nitrogen sources may be used singly or as a mixture. Inorganic salt compounds, which may be present in the media include the chloride, phosphorus or sulfate salts of calcium, magnesium, sodium, cobalt, molybdenum, potassium, manganese, zinc, copper and iron.

[0469] For preparing sulfur-containing fine chemicals, in particular the fine chemical, it is possible to use as sulfur source inorganic sulfur-containing compounds such as, for example, sulfates, sulfites, dithionites, tetrathionates, thiosulfates, sulfides or else organic sulfur compounds such as mercaptans and thiols.

[0470] It is possible to use as phosphorus source phosphoric acid, potassium dihydrogenphosphate or dipotassium hydrogenphosphate or the corresponding sodium-containing salts. Chelating agents can be added to the medium in order to keep the metal ions in solution. Particularly suitable chelating agents include dihydroxyphenols such as catechol or protocatechuate, or organic acids such as citric acid. The fermentation media employed according to the invention for cultivating microorganisms normally also contain other growth factors such as vitamins or growth promoters, which include, for example, biotin, riboflavin, thiamine, folic acid, nicotinic acid, pantothenate and pyridoxine. Growth factors and salts are often derived from complex media components such as yeast extract, molasses, corn steep liquor and the like. Suitable precursors can moreover be added to the culture medium. The exact composition of the media compounds depends greatly on the particular experiment and is chosen individually for each specific case. Information about media optimization is obtainable from the textbook “Applied Microbiol. Physiology, A Practical Approach” (editors P. M. Rhodes, P. F. Stanbury, IRL Press (1997) pp. 53-73, ISBN 0 19 963577 3). Growth media can also be purchased from commercial suppliers such as Standard 1 (Merck) or BHI (Brain heart infusion, DIFCO) and the like. All media components are sterilized either by heat (1.5 bar and 121° C. for 20 min) or by sterilizing filtration. The components can be sterilized either together or, if necessary, separately. All media components can be present at the start of the cultivation or optionally be added continuously or batchwise. The temperature of the culture is normally between 15° C. and 45° C., preferably at 25° C. to 40° C., and can be kept constant or changed during the experiment. The pH of the medium should be in the range from 5 to 8.5, preferably around 7. The pH for the cultivation can be controlled during the cultivation by adding basic compounds such as sodium hydroxide, potassium hydroxide, ammonia or aqueous ammonia or acidic compounds such as phosphoric acid or sulfuric acid. Foaming can be controlled by employing antifoams such as, for example fatty acid polyglycol esters. The stability of plasmids can be maintained by adding to the medium suitable substances having a selective effect, for example antibiotics. Aerobic conditions are maintained by introducing oxygen or oxygen-containing gas mixtures such as, for example ambient air into the culture. The temperature of the culture is normally from 20° C. to 45° C. and preferably from 25° C. to 40° C. The culture is continued until formation of the desired product is at a maximum. This aim is normally achieved within 10 hours to 160 hours.

[0471] The fermentation broths obtained in this way, containing the fine chemical in particular for example amino acids such as L-methionine, L-threonine and/or L-lysine, normally have a dry matter content of from 7.5 to 25% by weight. Sugar-limited fermentation is additionally advantageous, at least at the end, but especially over at least 30% of the fermentation time. This means that the concentration of utilizable sugar in the fermentation medium is kept at, or reduced to, ≧0 to 3 g/l during this time. The fermentation broth is then processed further. Depending on requirements, the biomass can be removed entirely or partly by separation methods, such as, for example, centrifugation, filtration, decantation or a combination of these methods, from the fermentation broth or left completely in it. The fermentation broth can then be thickened or concentrated by known methods, such as, for example, with the aid of a rotary evaporator, thin-film evaporator, falling film evaporator, by reverse osmosis or by nanofiltration. This concentrated fermentation broth can then be worked up by freeze-drying, spray drying, spray granulation or by other processes.

[0472] However, it is also possible to purify the fine chemical produced further. For this purpose, the product-containing composition is subjected to a chromatography on a suitable resin, in which case the desired product or the impurities are retained wholly or partly on the chromatography resin. These chromatography steps can be repeated if necessary, using the same or different chromatography resins. The skilled worker is familiar with the choice of suitable chromatography resins and their most effective use. The purified product can be concentrated by filtration or ultrafiltration and stored at a temperature at which the stability of the product is a maximum.

[0473] The identity and purity of the isolated compound(s) can be determined by prior art techniques. These include high performance liquid chromatography (HPLC), spectroscopic methods, mass spectrometry (MS), staining methods, thin-layer chromatography, NIRS, enzyme assay or microbiological assays. These analytical methods are summarized in: Patek et al. (1994) Appl. Environ. Microbiol. 60:133-140; Malakhova et al. (1996) Biotekhnologiya 11 27-32; and Schmidt et al. (1998) Bioprocess Engineer. 19:67-70. Ulmann's Encyclopedia of Industrial Chemistry (1996) Vol. A27, VCH: Weinheim, pp. 89-90, pp. 521-540, pp. 540-547, pp. 559-566, 575-581 and pp. 581-587; Michal, G (1999) Biochemical Pathways: An Atlas of Biochemistry and Molecular Biology, John Wiley and Sons; Fallon, A. et al. (1987) Applications of HPLC in Biochemistry in: Laboratory Techniques in Biochemistry and Molecular Biology, Vol. 17.

[0474] In yet another aspect, the invention also relates to harvestable parts and to propagation material of the transgenic plants according to the invention which either contain transgenic plant cells expressing a nucleic acid molecule according to the invention or which contains cells which show an increased cellular activity of the polypeptide of the invention, e.g. an increased expression level or higher activity of the described protein.

[0475] Harvestable parts can be in principle any useful parts of a plant, for example, flowers, pollen, seedlings, tubers, leaves, stems, fruit, seeds, roots etc. Propagation material includes, for example, seeds, fruits, cuttings, seedlings, tubers, rootstocks etc. Preferred are seeds, fruits, seedlings or tubers as harvestable or propagation material.

[0476] The invention furthermore relates to the use of the transgenic organisms according to the invention and of the cells, cell cultures, parts—such as, for example, roots, leaves and the like as mentioned above in the case of transgenic plant organisms—derived from them, and to transgenic propagation material such as seeds or fruits and the like as mentioned above, for the production of foodstuffs or feeding stuffs, pharmaceuticals or fine chemicals.

[0477] Accordingly in another embodiment, the present invention relates to the use of the nucleic acid molecule, the organism, e.g. the microorganism, the plant, plant cell or plant tissue, the vector, or the polypeptide of the present invention for making fine chemicals such as fatty acids, carotenoids, isoprenoids, vitamins, lipids, wax esters, (poly)saccharides and/or polyhydroxyalkanoates, and/or its metabolism products, in particular, steroid hormones, cholesterol, prostaglandin, triacylglycerols, bile acids and/or ketone bodies producing cells, tissues and/or plants. There are a number of mechanisms by which the yield, production, and/or efficiency of production of fatty acids, carotenoids, isoprenoids, vitamins, wax esters, lipids, (poly)saccharides and/or polyhydroxyalkanoates, and/or its metabolism products, in particular, steroid hormones, cholesterol, triacylglycerols, prostaglandin, bile acids and/or ketone bodies or further of above defined fine chemicals incorporating such an altered protein can be affected. In the case of plants, by e.g. increasing the expression of acetyl-CoA which is the basis for many products, e.g., fatty acids, carotenoids, isoprenoids, vitamines, lipids, (poly)saccharides, wax esters, and/or polyhydroxyalkanoates, and/or its metabolism products, in particular, prostaglandin, steroid hormones, cholesterol, triacylglycerols, bile acids and/or ketone bodies in a cell, it may be possible to increase the amount of the produced said compounds thus permitting greater ease of harvesting and purification or in case of plants more efficient partitioning. Further, one or more of said metabolism products, increased amounts of the cofactors, precursor molecules, and intermediate compounds for the appropriate biosynthetic pathways maybe required. Therefore, by increasing the number and/or activity of transporter proteins involved in the import of nutrients, such as carbon sources (i.e., sugars), nitrogen sources (i.e., amino acids, ammonium salts), phosphate, and sulfur, it may be possible to improve the production of acetyl CoA and its metabolism products as mentioned above, due to the removal of any nutrient supply limitations on the biosynthetic process. In particular, it may be possible to increase the yield, production, and/or efficiency of production of said compounds, e.g. fatty acids, carotenoids, isoprenoids, vitamins, was esters, lipids, (poly)saccharides, and/or polyhydroxyalkanoates, and/or its metabolism products, in particular, steroid hormones, cholesterol, prostaglandin, triacylglycerols, bile acids and/or ketone bodies molecules etc. in plants.

[0478] Furthermore preferred is a method for the recombinant production of pharmaceuticals or fine chemicals in host organisms, wherein a host organism is transformed with one of the above-described nucleic acid constructs comprising one or more structural genes which encode the desired fine chemical or catalyze the biosynthesis of the desired fine chemical, the transformed host organism is cultured, and the desired fine chemical is isolated from the culture medium. This method can be applied widely to fine chemicals such as enzymes, vitamins, amino acids, sugars, fatty acids, and natural and synthetic flavorings, aroma substances and colorants or compositions comprising these. Especially preferred is the additional production of further amino acids, tocopherols and tocotrienols and carotenoids or compositions comprising said compounds. The transformed host organisms are cultured and the products are recovered from the host organisms or the culture medium by methods known to the skilled worker or the organism itself servers as food or feed supplement. The production of pharmaceuticals such as, for example, antibodies or vaccines, is described by Hood E E, Jilka J M. Curr Opin Biotechnol. 1999 Aug.; 10(4): 382-6; Ma J K, Vine N D. Curr Top Microbiol Immunol. 1999; 236:275-92.

[0479] In one embodiment, the present invention relates to a method for the identification of a gene product conferring an increase in the fine chemical production in a cell, comprising the following steps:
[0480] (a) contacting, e.g. hybridising, the nucleic acid molecules of a sample, e.g. cells, tissues, plants or microorganisms or a nucleic acid library, which can contain a candidate gene encoding a gene product conferring an increase in the fine chemical after expression, with the nucleic acid molecule of the present invention;
[0481] (b) identifying the nucleic acid molecules, which hybridize under relaxed stringent conditions with the nucleic acid molecule of the present invention in particular to the nucleic acid molecule sequence shown in SEQ ID NO: 1, 3, 5, 7, 9, 11, 13, 15, 17, 19, 21, 23, 25, 27, 29, 31, 33, 35, 37, 39, 41, 43, 45, 55, 57, 59, 61, 63, 65, 67, 69, 71, 73, 75, 77, 79, 81, 83, 85, 87, 89, 91, 93, 95, 97, 99, 101, 103, 105, 107, 109, 111, 113, 115, 117, 119, 121, 123, 125, 127, 129, 131, 133, 135, 137, 139, 141, 143, 145, 147, 149, 151, 153, 155, 157, 159, 161, 163, 165, 167, 169, 171, 173, 175, 177, 179, 181, 183, 185, 187, 189, 191, 193, 195, 197, 199, 201, 203, 205, 207, 209, 211, 213, 215, 217, 219, 221, 223, 225, 227, 229, 231, 233, 235, 237, 239, 241, 243, 245, 247, 249, 251, 253, 255, 257, 259, 261, 263, 265, 267, 269, 271, 273, 275, 277, 279, 281, 283, 285, 287, 289, 291, 293, 295, 297, 299, 301, 303, 305, 307, 309, 311, 313, 315, 317, 319, 321, 323, 325, 327, 329, 331, 333, 335, 337, 339, 341, 343, 345, 347, 349, 351, 353, 355, 357, 359, 361, 363, 365, 367, 369, 371, 373, 375, 377, 379, 381, 383, 385, 387, 389, 391 or 393 and, optionally, isolating the full length cDNA clone or complete genomic clone;
[0482] (c) introducing the candidate nucleic acid molecules in host cells, preferably in a plant cell or a microorganism, appropriate for producing the fine chemical;
[0483] (d) expressing the identified nucleic acid molecules in the host cells;
[0484] (e) assaying the the fine chemical level in the host cells; and
[0485] (f) identifying the nucleic acid molecule and its gene product which expression confers an increase in the the fine chemical level in the host cell after expression compared to the wild type.

[0486] Relaxed hybridisation conditions are: After standard hybridisation procedures washing steps can be performed at low to medium stringency conditions usually with washing conditions of 40°-55° C. and salt conditions between 2×SSC and 0.2×SSC with 0.1% SDS in comparison to stringent washing conditions as e.g. 60°-68° C. with 0.1% SDS. Further examples can be found in the references listed above for the stringend hybridization conditions. Usually washing steps are repeated with increasing stringency and length until a useful signal to noise ratio is detected and depend on many factors as the target, e.g. its purity, GC-content, size etc, the probe, e.g. its length, is it a RNA or a DNA probe, salt conditions, washing or hybridisation temperature, washing or hybridisation time etc.

[0487] In another embodiment, the present invention relates to a method for the identification of a gene product conferring an increase in the fine chemical production in a cell, comprising the following steps:
[0488] (a) identifiying nucleic acid molecules of an organism; which can contain a candidate gene encoding a gene product conferring an increase in the fine chemical after expression, which are at least 20%, preferably 25%, more preferably 30%, even more preferred are 35%, 40% or 50%, even more preferred are 60%, 70% or 80%, most preferred are 90% or 95% or more homology to the nucleic acid molecule of the present invention, for example via homology search in a data bank;
[0489] (b) introducing the candidate nucleic acid molecules in host cells, preferably in a plant cells or microorganisms, appropriate for producing the fine chemical;
[0490] (c) expressing the identified nucleic acid molecules in the host cells;
[0491] (d) assaying the the fine chemcial level in the host cells; and
[0492] (e) identifying the nucleic acid molecule and its gene product which expression confers an increase in the the fine chemical level in the host cell after expression compared to the wild type.

[0493] The nucleic acid molecules identified can then be used for the production of the fine chemical in the same way as the nucleic acid molecule of the present invention. Accordingly, in one embodiment, the present invention relates to a process for the production of the fine chemical, comprising (a) identifying a nucleic acid molecule according to aforementioned steps (a) to (f) or (a) to (e) and recovering the free or bound fine chemical from a organism having an increased cellular activity of a polypeptide encoded by the isolated nucleic acid molecule compared to a wild type.

[0494] Furthermore, in one embodiment, the present invention relates to a method for the identification of a compound stimulating production of the fine chemical to said plant comprising:
[0495] a) contacting cells which express the polypeptide of the present invention or its mRNA with a candidate compound under cell cultivation conditions;
[0496] b) assaying an increase in expression of said polypeptide or said mRNA;
[0497] c) comparing the expression level to a standard response made in the absence of said candidate compound; whereby, an increased expression over the standard indicates that the compound is stimulating production of the fine chemical.

[0498] Furthermore, in one embodiment, the present invention relates to a method for the screening for agonists or an antagonist of the activity of the polypeptide of the present invention or used in the process of the present invention, e.g. a polypeptide conferring an increase of the fine chemical in an organism or a part therof after increasing the activity in an organism or a part thereof, comprising:
[0499] (a) contacting cells, tissues, plants or microorganisms which express the polypeptide according to the invention with a candidate compound or a sample comprising a plurality of compounds under conditions which permit the expression the polypeptide of the present invention or used in the process of the present invention;
[0500] (b) assaying the fine chemical level or the polypeptide expression level in the cell, tissue, plant or microorganism or the media the cell, tissue, plant or microorganisms is cultured or maintained in; and
[0501] (c) identifying a agonist or antagonist by comparing the measured the fine chemical level or polypeptide of the invention or used in the invention expression level with a standard the fine chemical or polypeptide expression level measured in the absence of said candidate compound or a sample comprising said plurality of compounds, whereby an increased level over the standard indicates that the compound or the sample comprising said plurality of compounds is an agonist and a decreased level over the standard indicates that the compound or the sample comprising said plurality of compounds is an antagonist.

[0502] Furthermore, in one embodiment, the present invention relates to process for the identification of a compound conferring increased the fine chemical production in a plant or microorganism, comprising the steps:
[0503] (a) culturing a cell or tissue or microorganism or maintaining a plant expressing the polypeptide according to the invention or a nucleic acid molecule encoding said polypeptide and a readout system capable of interacting with the polypeptide under suitable conditions which permit the interaction of the polypeptide with said readout system in the presence of a compound or a sample comprising a plurality of compounds and capable of providing a detectable signal in response to the binding of a compound to said polypeptide under conditions which permit the expression of said readout system and the polypeptide of the present invention or used in the process of the invention; and
[0504] (b) identifying if the compound is an effective agonist by detecting the presence or absence or increase of a signal produced by said readout system.

[0505] The screen for a gene product or an agonist conferring an increase in the fine chemical production can be performed by growth of an organism for example a microorganism in the presence of growth reducing amounts of an inhibitor of the synthesis of the fine chemical. Better growth, eg higher dividing rate or high dry mass in comparison to the control under such conditions would identify a gene or gene product or an agonist conferring an increase in fine chemical production.

[0506] One can think to screen for increased fine chemical production by for example resistance to a drug blocking the fine chemical synthesis and looking whether this effect is dependent on the protein of the invention e.g. comparing near identical organisms with low and high biological acitivity of the protein of the invention.

[0507] Said compound may be chemically synthesized or microbiologically produced and/or comprised in, for example, samples, e.g., cell extracts from, e.g., plants, animals or microorganisms, e.g. pathogens. Furthermore, said compound(s) may be known in the art but hitherto not known to be capable of suppressing or activating the polypeptide of the present invention. The reaction mixture may be a cell free extract or may comprise a cell or tissue culture. Suitable set ups for the method of the invention are known to the person skilled in the art and are, for example, generally described in Alberts et al., Molecular Biology of the Cell, third edition (1994), in particular Chapter 17. The compounds may be, e.g., added to the reaction mixture, culture medium, injected into the cell or sprayed onto the plant.

[0508] If a sample containing a compound is identified in the method of the invention, then it is either possible to isolate the compound from the original sample identified as containing the compound capable of activating or increasing the content of the fine chemical in an organism or part thereof, or one can further subdivide the original sample, for example, if it consists of a plurality of different compounds, so as to reduce the number of different substances per sample and repeat the method with the subdivisions of the original sample. Depending on the complexity of the samples, the steps described above can be performed several times, preferably until the sample identified according to the method of the invention only comprises a limited number of or only one substance(s). Preferably said sample comprises substances of similar chemical and/or physical properties, and most preferably said substances are identical. Preferably, the compound identified according to the above-described method or its derivative is further formulated in a form suitable for the application in plant breeding or plant cell and tissue culture.

[0509] The compounds which can be tested and identified according to a method of the invention may be expression libraries, e.g., cDNA expression libraries, peptides, proteins, nucleic acids, antibodies, small organic compounds, hormones, peptidomimetics, PNAs or the like (Milner, Nature Medicine 1 (1995), 879-880; Hupp, Cell 83 (1995), 237-245; Gibbs, Cell 79 (1994), 193-198 and references cited supra). Said compounds can also be functional derivatives or analogues of known inhibitors or activators. Methods for the preparation of chemical derivatives and analogues are well known to those skilled in the art and are described in, for example, Beilstein, Handbook of Organic Chemistry, Springer edition New York Inc., 175 Fifth Avenue, New York, N.Y. 10010 U.S.A. and Organic Synthesis, Wiley, New York, USA. Furthermore, said derivatives and analogues can be tested for their effects according to methods known in the art. Furthermore, peptidomimetics and/or computer aided design of appropriate derivatives and analogues can be used, for example, according to the methods described above. The cell or tissue that may be employed in the method of the invention preferably is a host cell, plant cell or plant tissue of the invention described in the embodiments hereinbefore.

[0510] Thus, in a further embodiment the invention relates to a compound obtained or identified according to the method for identifiying an agonist of the invention said compound being an agonist of the polypeptide of the present invention or used in the process of the present invention.

[0511] Accordingly, in one embodiment, the present invention further relates to a compound identified by the method for identifying a compound of the present invention.

[0512] Said compound is, for example, a homologous of the polypeptide of the present invention. Homologues of the polypeptid of the present invention can be generated by mutagenesis, e.g., discrete point mutation or truncation of the polypeptide of the present invenion. As used herein, the term “homologue” refers to a variant form of the protein, which acts as an agonist of the activity of the polypeptide of the present invention. An agonist of said protein can retain substantially the same, or a subset, of the biological activities of the polypeptide of the present invention. In particular, said agonist confers the increase of the expression level of the polypeptide of the present invention and/or the expression of said agonist in an organisms or part thereof confers the increase of free and/or bound the fine chemical in the organism or part thereof.

[0513] In one embodiment, the invention relates to an antibody specifically recognizing the compound or agonist of the present invention.

[0514] The invention also relates to a diagnostic composition comprising at least one of the aforementioned nucleic acid molecules, vectors, proteins, antibodies or compounds of the invention and optionally suitable means for detection.

[0515] The diagnostic composition of the present invention is suitable for the isolation of mRNA from a cell and contacting the mRNA so obtained with a probe comprising a nucleic acid probe as described above under hybridizing conditions, detecting the presence of mRNA hybridized to the probe, and thereby detecting the expression of the protein in the cell. Further methods of detecting the presence of a protein according to the present invention comprise immunotechniques well known in the art, for example enzyme linked immunosorbent assay. Furthermore, it is possible to use the nucleic acid molecules according to the invention as molecular markers or primer in plant breeding. Suitable means for detection are well known to a person skilled in the art, e.g. buffers and solutions for hydridization assays, e.g. the aforementioned solutions and buffers, further and means for Southern-, Western-, Northern- etc.—blots, as e.g. described in Sambrook et al. are known.

[0516] In another embodiment, the present invention relates to a kit comprising the nucleic acid molecule, the vector, the host cell, the polypeptide, the antisense nucleic acid, the antibody, plant cell, the plant or plant tissue, the harvestable part, the propagation material and/or the compound or agonist or antagonists identified according to the method of the invention.

[0517] The compounds of the kit of the present invention may be packaged in containers such as vials, optionally with/in buffers and/or solution. If appropriate, one or more of said components might be packaged in one and the same container. Additionally or alternatively, one or more of said components might be adsorbed to a solid support as, e.g. a nitrocellulose filter, a glas plate, a chip, or a nylon membrane or to the well of a micro titerplate. The kit can be used for any of the herein described methods and embodiments, e.g. for the production of the host cells, transgenic plants, pharmaceutical compositions, detection of homologous sequences, identification of antagonists or agonists, as food or feed or as a supplement thereof, as supplement for the treating of plants, etc.

[0518] Further, the kit can comprise instructions for the use of the kit for any of said embodiments, in particular for the use for producing organisms or part thereof having an increased free or bound the fine chemcial content.

[0519] In one embodiment said kit comprises further a nucleic acid molecule encoding one or more of the aforementioned protein, and/or an antibody, a vector, a host cell, an antisense nucleic acid, a plant cell or plant tissue or a plant.

[0520] In a further embodiment, the present invention relates to a method for the production of a agricultural composition providing the nucleic acid molecule, the vector or the polypeptide of the invention or comprising the steps of the method according to the invention for the identification of said compound, agonist or antagonist; and formulating the nucleic acid molecule, the vector or the polypeptide of the invention or the agonist, or compound identified according to the methods or processes of the present invention or with use of the subject matters of the present invention in a form applicable as plant agricultural composition.

[0521] In another embodiment, the present invention relates to a method for the production of a “the fine chemical”-production supporting plant culture composition comprising the steps of the method for of the present invention; and formulating the compound identified in a form acceptable as agricultural composition.

[0522] Under “acceptable as agricultural composition” is understood, that such a composition is in agreement with the laws regulating the content of fungicides, plant nutrients, herbizides, etc. Preferably such a composition is without any harm for the protected plants and the animals (humans included) fed therewith.

[0523] The present invention also pertains to several embodiments relating to further uses and methods. The nucleic acid molecule, polypeptide, protein homologues, fusion proteins, primers, vectors, host cells, described herein can be used in one or more of the following methods: identification of plants useful for fine chemical production as mentioned and related organisms; mapping of genomes; identification and localization of sequences of interest; evolutionary studies; determination of regions required for function; modulation of an activity.

[0524] The nucleic acid molecule of the invention, the vector of the invention or the nucleic acid construct of the invention may also be useful for the production of organisms resistant to inhibitors of the fine chemical e.g. the amino acid production biosynthesis pathways. In particular, the overexpression of the polypeptide of the present invention may protect plants against herbicides, which block the amino acid, in particular the fine chemical, synthesis in said plant. Examples of herbicides blocking the fine chemical synthesis e.g. the amino acid synthesis in plants are for example sulfonylurea and imidazolinone herbicides which catalyze the first step in branched-chain amino acid biosynthesis

[0525] Accordingly, the nucleic acid molecules of the present invention have a variety of uses. First, they may be used to identify an organism or a close relative thereof. Also, they may be used to identify the presence thereof or a relative thereof in a mixed population of microorganisms or plants. By probing the extracted genomic DNA of a culture of a unique or mixed population of plants under stringent conditions with a probe spanning a region of the gene of the present invention which is unique to this, one can ascertain whether the present invention has been used or whether it or a close relative is present.

[0526] Further, the nucleic acid molecule of the invention may be sufficiently homologous to the sequences of related species such that these nucleic acid molecules may serve as markers for the construction of a genomic map in related organism.

[0527] Accordingly, the present invention relates to a method for breeding plants for the production of the fine chemical, comprising
[0528] (a) providing a first plant variety produced according to the process of the invention preferably (over)expressing the nucleic acid molecule of the invention;
[0529] (b) crossing the first plant variety with a second plant variety; and
[0530] (c) selecting the offspring plants which overproduce the fine chemical by means of analysis the distribution of a molecular marker in the offspring representing the first plant variety and its capability to (over)produce the fine chemical.

[0531] Details about the use of molecular markers in breeding can be found in Kumar et al., 1999 (Biotech Adv., 17:143-182) and Peleman and van der Voort 2003 (Trends Plant Sci. 2003 July; 8(7):330-334). The molecular marker can e.g. relate to the nucleic acid molecule of the invention and/or its expression level. Accordingly, the molecular marker can be a probe or a PCR primer set useful for identification of the genomic existence or genomic localisation of the nucleic acid molecule of the invention, e.g. in a Southern blot analysis or a PCR or its expression level, i.g. in a Northern Blot analysis or a quantitative PCR. Accordingly, in one embodiment, the present invention relates to the use of the nucleic acid molecule of the present invention or encoding the polypeptide of the present invention as molecular marker for breeding.

[0532] The nucleic acid molecules of the invention are also useful for evolutionary and protein structural studies. By comparing the sequences of the invention or used in the process of the invention to those encoding similar enzymes from other organisms, the evolutionary relatedness of the organisms can be assessed. Similarly, such a comparison permits an assessment of which regions of the sequence are conserved and which are not, which may aid in determining those regions of the protein which are essential for the functioning of the enzyme. This type of determination is of value for protein engineering studies and may give an indication of what the protein can tolerate in terms of mutagenesis without losing function.

[0533] Accordingly, the nucleic acid molecule of the invention can be used for the identification of other nucleic acids conferring an increase of the fine chemical after expression.

[0534] Further, the nucleic acid molecule of the invention or a fragment of a gene conferring the expression of the polypeptide of the invention, preferably comprising the nucleic acid molecule of the invention, can be used for marker assisted breeding or association mapping of the fine chemical derived traits

[0535] Accordingly, the nucleic acid of the invention, the polypeptide of the invention, the nucleic acid construct of the invention, the organisms, the host cell, the microorgansims, the plant, plant tissue, plant cell, or the part thereof of the invention, the vector of the invention, the agonist identified with the method of the invention, the nucleic acid molecule identified with the method of the present invention, can be used for the production of the fine chemical or of the fine chemical and one or more other ingredients such as amino acids, in particular Threoinine, Alanine, Glutamin, Glutamic acid, Valine, Aspargine, Phenylalanine, Leucine, Proline, Tryptophan Tyrosine, Valine, Isoleucine and Arginine. Accordingly, the nucleic acid of the invention, or the nucleic acid molecule identified with the method of the present invention or the complement sequences thereof, the polypeptide of the invention, the nucleic acid construct of the invention, the organisms, the host cell, the microorgansims, the plant, plant tissue, plant cell, or the part thereof of the invention, the vector of the invention, the antagonist identified with the method of the invention, the antibody of the present invention, the antisense molecule of the present invention, can be used for the reduction of the fine chemical in a organism or part thereof, e.g. in a cell.

[0536] Further, the nucleic acid of the invention, the polypeptide of the invention, the nucleic acid construct of the invention, the organisms, the host cell, the microorgansims, the plant, plant tissue, plant cell, or the part thereof of the invention, the vector of the invention, the antagonist or the agonist identified with the method of the invention, the antibody of the presen invention, the antisense molecule of the present invention or the nucleic acid molecule identified with the method of the present invention, can be used for the preparation of an agricultural composition.

[0537] Furthermore, the nucleic acid of the invention, the polypeptide of the invention, the nucleic acid construct of the invention, the organisms, the host cell, the microorgansims, the plant, plant tissue, plant cell, or the part thereof of the invention, the vector of the invention, antagonist or the agonist identified with the method of the invention, the antibody of the presen invention, the antisense molecule of the present invention or the nucleic acid molecule identified with the method of the present invention, can be used for the identification and production of compounds capable of conferring a modulation of the fine chemical levels in an organism or parts thereof, preferably to identify and produce compounds conferring an increase of the fine chemical levels in an organism or parts thereof, if said identified compound is applied to the organism or part thereof, i.e. as part of its food, or in the growing or culture media.

[0538] These and other embodiments are disclosed and encompassed by the description and examples of the present invention. Further literature concerning any one of the methods, uses and compounds to be employed in accordance with the present invention may be retrieved from public libraries, using for example electronic devices. For example the public database “Medline” may be utilized which is available on the Internet, for example under hftp://www.ncbi.nlm.nih.gov/PubMed/medline.html. Further databases and addresses, such as hftp://www.ncbi.nlm.nih.gov/, hftp://www.infobiogen.fr/, hftp://www.fmi.ch/biology/research-tools.html, hftp://www.tigr.org/, are known to the person skilled in the art and can also be obtained using, e.g., hftp://www.lycos.com. An overview of patent information in biotechnology and a survey of relevant sources of patent information useful for retrospective searching and for current awareness are given in Berks, TIBTECH 12 (1994), 352-364.

[0539] Table 1 gives an overview about the fine chemicals produced by SEQ ID NO: 1 of the present invention.

TABLE 1
Fine chemicals produced with SEQ ID NO: 1 (YNL090W)

| Metabolite | Method | Min | Max |
|---|---|---|---|
| Tryptophane | LC | 1.26 | 4.39 |
| Proline | LC | 1.73 | 6.29 |
| Arginine | LC | 1.54 | 4.23 |
| Raffinose | LC | 2.57 | 16.05 |
| Ferulic Acid | LC | 1.40 | 2.41 |
| Phenylalanine | LC | 1.34 | 2.75 |
| Tyrosine | LC | 1.44 | 2.55 |
| gamma + beta − Tocopherol | LC | 0.36 | 0.66 |
| Cerotic Acid (C26:0) | GC | 1.41 | 3.78 |
| Lignoceric Acid (C24:0) | GC | 1.34 | 2.14 |
| Alanine | GC | 1.21 | 1.57 |
| Glycine | GC | 1.46 | 1.67 |
| Threonine | GC | 1.21 | 2.02 |
| Putrescine | GC | 0.18 | 0.42 |
| Serine | GC | 1.29 | 1.96 |
| Valine | GC | 1.20 | 2.31 |
| Isoleucine | GC | 1.30 | 4.35 |
| Leucine | GC | 1.51 | 5.01 |
| Sinapic Acid | GC | 1.28 | 2.08 |
| 3,4-Dihydroxyphenylalanine | GC | 1.37 | 1.87 |
| (=DOPA) | | | |
| Stearic Acid (C18:0) | GC | 1.16 | 2.13 |
| beta-Carotene | LC | 1.77 | 2.68 |

Column 1 shows the metabolite produced. Column 2 mirrors the analytic method and column 3 and 4 shows the minimum and maximum production of the respective fine chemical as x-fold.

[0540] The present invention is illustrated by the examples, which follow. The present examples illustrate the basic invention without being intended as limiting the subject of the invention. The content of all of the references, patent applications, patents and published patent applications cited in the present patent application is herewith incorporated by reference.

### EXAMPLES

### Example 1

### Cloning SEQ ID NO: 1 in Escherichia coli

[0541] SEQ ID NO: 1 was cloned into the plasmids pBR322 (Sutcliffe, J. G. (1979) Proc. Natl Acad. Sci. USA, 75: 3737-3741); pACYC177 (Change & Cohen (1978) J. Bacteriol. 134: 1141-1156); plasmids of the pBS series (pBSSK+, pBSSK− and others; Stratagene, LaJolla, USA) or cosmids such as SuperCos1 (Stratagene, LaJolla, USA) or Lorist6 (Gibson, T. J. Rosenthal, A., and Waterson, R. H. (1987) Gene 53: 283-286) for expression in E. coli using known, well-established procedures (see, for example, Sambrook, J. et al. (1989) “Molecular Cloning: A Laboratory Manual”. Cold Spring Harbor Laboratory Press or Ausubel, F. M. et al. (1994) “Current Protocols in Molecular Biology”, John Wiley & Sons).

### Example 2

### DNA Sequencing and Computerized Functional Analysis

[0542] The DNA was sequenced by standard procedures, in particular the chain determination method, using ABI377 sequencers (see, for example, Fleischman, R. D. et al. (1995) “Whole-genome Random Sequencing and Assembly of Haemophilus Influenzae Rd., Science 269; 496-512)”.

### Example 3

### In-Vivo Mutagenesis

[0543] An in vivo mutagenesis of Corynebacterium glutamicum for the production of amino acids can be carried out by passing a plasmid DNA (or another vector DNA) through E. coli and other microorganisms (for example Bacillus spp. or yeasts such as Saccharomyces cerevisiae), which are not capable of maintaining the integrity of its genetic information. Usual mutator strains have mutations in the genes for the DNA repair system [for example mutHLS, mutD, mutT and the like; for comparison, see Rupp, W. D. (1996) DNA repair mechanisms in Escherichia coli and Salmonella, pp. 2277-2294, ASM: Washington]. The skilled worker knows these strains. The use of these strains is illustrated for example in Greener, A. and Callahan, M. (1994) Strategies 7; 32-34.

### Example 4

### DNA Transfer between Escherichia coli and Corynebacterium Glutamicum

[0544] Several Corynebacterium and Brevibacterium species comprise endogenous plasmids (such as, for example, pHM1519 or pBL1), which replicate autonomously (for a review, see, for example, Martin, J. F. et al. (1987) Biotechnology 5: 137-146). Shuttle vectors for Escherichia coli and Corynebacterium glutamicum can be constructed easily using standard vectors for E. coli (Sambrook, J. et al., (1989), “Molecular Cloning: A Laboratory Manual”, Cold Spring Harbor Laboratory Press or Ausubel, F. M. et al. (1994) “Current Protocols in Molecular Biology”, John Wiley & Sons), which have a replication origin for, and suitable marker from, Corynebacterium glutamicum added. Such replication origins are preferably taken from endogenous plasmids, which have been isolated from Corynebacterium and Brevibacterium species. Genes, which are used in particular as transformation markers for these species are genes for kanamycin resistance (such as those which originate from the Tn5 or Tn-903 transposon) or for chloramphenicol resistance (Winnacker, E. L. (1987) “From Genes to Clones—Introduction to Gene Technology, VCH, Weinheim). There are many examples in the literature of the preparation of a large multiplicity of shuttle vectors which are replicated in E. coli and C. glutamicum and which can be used for various purposes including the overexpression of genes (see, for example, Yoshihama, M. et al. (1985) J. Bacteriol. 162: 591-597, Martin, J. F. et al., (1987) Biotechnology, 5: 137-146 and Eikmanns, B. J. et al. (1992) Gene 102: 93-98). Suitable vectors which replicate in coryneform bacteria are for example, pZ1 (Menkel et al., Appl. Environ. Microbiol., 64, 1989: 549-554) pEkEx1 (Eikmanns et al., Gene 102, 1991: 93-98) or pHS2-1 (Sonnen et al, Gene 107, 1991: 69-74). These vectors are based on the cryptic plasmids pHM1519, pBL1 or pGA1. Other plasmid vectors such as, for example, those based on pCG4 (U.S. Pat. No. 4,489,160), pNG2 (Serwold-Davis et al., FEMS Microbiol. Lett., 66, 1990: 119-124) or pAG1 (U.S. Pat. No. 5,158,891) can be used in the same manner.

[0545] Using standard methods, it is possible to clone a gene of interest into one of the above-described shuttle vectors and to introduce such hybrid vectors into Corynebacterium glutamicum strains. The transformation of C. glutamicum can be achieved by protoplast transformation (Kastsumata, R. et al., (1984) J. Bacteriol. 159, 306-311), electroporation (Liebl, E. et al., (1989) FEMS Microbiol. Letters, 53: 399-303) and in those cases where specific vectors are used also by conjugation (such as, for example, described in Schäfer, A., et al. (1990) J. Bacteriol. 172: 1663-1666). Likewise, it is possible to transfer the shuttle vectors for C. glutamicum to E. coli by preparing plasmid DNA from C. glutamicum (using standard methods known in the art) and transforming it into E. coli. This transformation step can be carried out using standard methods, but preferably using a Mcr-deficient E. coli strain, such as NM522 (Gough & Murray (1983) J. Mol. Biol. 166: 1-19).

[0546] If the transformed sequence(s) is/are to be integrated advantageously into the genome of the coryneform bacteria, standard techniques known to the skilled worker also exist for this purpose. Examples, which are used for this purpose are plasmid vectors as they have been described by Remscheid et al. (Appl. Environ. Microbiol., 60, 1994: 126-132) for the duplication and amplification of the hom-thrB operon. In this method, the complete gene is cloned into a plasmid vector, which is capable of replication in a host such as E. coli, but not in C. glutamicum. Suitable vectors are, for example, pSUP301 (Simon et al., Bio/Technology 1, 1983: 784-791), pKIBmob or pK19mob (Schäfer et al., Gene 145, 1994: 69-73), pGEM-T (Promega Corp., Madison, Wis., USA), pCR2.1-TOPO (Schuman, J. Biol. Chem., 269, 1994: 32678-32684, U.S. Pat. No. 5,487,993), pCR®Blunt (Invitrogen, Groningen, the Netherlands) or pEM1 (Schrumpf et al., J. Bacteriol., 173, 1991: 4510-4516).

### Example 5

### Determining the Expression of the Mutant/Transgenic Protein

[0547] The observations of the acivity of a mutated, or transgenic, protein in a transformed host cell are based on the fact that the protein is expressed in a similar manner and in a similar quantity as the wild-type protein. A suitable method for determining the transcription quantity of the mutant, or transgenic, gene (a sign for the amount of mRNA which is available for the translation of the gene product) is to carry out a Northern blot (see, for example, Ausubel et al., (1988) Current Protocols in Molecular Biology, Wiley: New York), where a primer which is designed in such a way that it binds to the gene of interest is provided with a detectable marker (usually a radioactive or chemiluminescent marker) so that, when the total RNA of a culture of the organism is extracted, separated on a gel, applied to a stable matrix and incubated with this probe, the binding and quantity of the binding of the probe indicates the presence and also the amount of mRNA for this gene. Another method is a quantitative PCR. This information detects the extent to which the gene has been transcribed. Total cell RNA can be isolated from Corynebacterium glutamicum by a variety of methods, which are known in the art, as described in Bormann, E. R. et al., (1992) Mol. Microbiol. 6: 317-326.

[0548] Standard techniques, such as Western blot, may be employed to determine the presence or relative amount of protein translated from this mRNA (see, for example, Ausubel et al. (1988) “Current Protocols in Molecular Biology”, Wiley, New York). In this method, total cell proteins are extracted, separated by gel electrophoresis, transferred to a matrix such as nitrocellulose and incubated with a probe, such as an antibody, which binds specifically to the desired protein. This probe is usually provided directly or indirectly with a chemiluminescent or calorimetric marker, which can be detected readily. The presence and the observed amount of marker indicate the presence and the amount of the sought mutant protein in the cell. However, other methods are also known.

### Example 6

### Growth of Genetically Modified Corynebacterium glutamicum: Media and Culture Conditions

[0549] Genetically modified Corynebacteria are grown in synthetic or natural growth media. A number of different growth media for Corynebacteria are known and widely available (Lieb et al. (1989) Appl. Microbiol. Biotechnol. 32: 205-210; von der Osten et al. (1998) Biotechnology Letters 11: 11-16; Patent DE 4 120 867; Liebl (1992) “The Genus Corynebacterium”, in: The Procaryotes, Vol. II, Balows, A., et al., Ed. Springer-Verlag).

[0550] Said media which can be used according to the invention usually consist of one or more carbon sources, nitrogen sources, inorganic salts, vitamins and trace elements. Preferred carbon sources are sugars such as mono-, di- or polysaccharides. Examples of very good carbon sources are glucose, fructose, mannose, galactose, ribose, sorbose, ribulose, lactose, maltose, sucrose, raffinose, starch or cellulose. Sugars may also be added to the media via complex compounds such as molasses or other by-products of sugar refining. It may also be advantageous to add mixtures of various carbon sources. Other possible carbon sources are alcohols and/or organic acids such as methanol, ethanol, acetic acid or lactic acid. Nitrogen sources are usually organic or inorganic nitrogen compounds or materials containing said compounds. Examples of nitrogen sources include ammonia gas, aqueous ammonia solutions or ammonium salts such as NH₄Cl, or (NH₄)₂SO₄, NH₄OH, nitrates, urea, amino acids or complex nitrogen sources such as cornsteep liquor, soybean flour, soybean protein, yeast extract, meat extract and others. Mixtures of the above nitrogen sources may be used advantageously.

[0551] Inorganic salt compounds, which may be included in the media comprise the chloride, phosphorus or sulfate salts of calcium, magnesium, sodium, cobalt, molybdenum, potassium, manganese, zinc, copper and iron. Chelating agents may be added to the medium in order to keep the metal ions in solution. Particularly suitable chelating agents include dihydroxyphenols such as catechol or protocatechulate or organic acids such as citric acid. The media usually also contain other growth factors such as vitamins or growth promoters, which include, for example, biotin, riboflavin, thiamine, folic acid, nicotinic acid, panthothenate and pyridoxine. Growth factors and salts are frequently derived from complex media components such as yeast extract, molasses, cornsteep liquor and the like. The exact composition of the compounds used in the media depends heavily on the particular experiment and is decided upon individually for each specific case. Information on the optimization of media can be found in the textbook “Applied Microbiol. Physiology, A Practical Approach” (Ed. P. M. Rhodes, P. F. Stanbury, IRL Press (1997) S. 53-73, ISBN 0 19 963577 3). Growth media can also be obtained from commercial suppliers, for example Standard 1 (Merck) or BHI (Brain heart infusion, DIFCO) and the like.

[0552] All media components are sterilized, either by heat (20 min at 1.5 bar und 121° C.) or by filter sterilization. The components may be sterilized either together or, if required, separately. All media components may be present at the start of the cultivation or added continuously or batchwise, as desired.

[0553] The culture conditions are defined separately for each experiment. The temperature is normally between 15° C. and 45° C. and may be kept constant or may be altered during the experiment. The pH of the medium should be in the range from 5 to 8.5, preferably around 7.0, and can be maintained by adding buffers to the media. An example of a buffer for this purpose is a potassium phosphate buffer. Synthetic buffers such as MOPS, HEPES, ACES and the like may be used as an alternative or simultaneously. The culture pH value may also be kept constant during the culture period by addition of, for example, NaOH or NH₄OH. If complex media components such as yeast extract are used, additional buffers are required less since many complex compounds have a high buffer capacity. When using a fermenter for the culture of microorganisms, the pH value can also be regulated using gaseous ammonia.

[0554] The incubation period is generally in a range of from several hours to several days. This time period is selected in such a way that the maximum amount of product accumulates in the fermentation broth. The growth experiments, which are disclosed can be carried out in a multiplicity of containers such as microtiter plates, glass tubes, glass flasks or glass or metal fermenters of various sizes. To screen a large number of clones, the microorganisms should be grown in microtiter plates, glass tubes or shake flasks, either using simple flasks or baffle flasks. 100 ml shake flasks filled with 10% (based on the volume) of the growth medium required are preferably used. The flasks should be shaken on an orbital shaker (amplitude 25 mm) at a rate ranging from 100 to 300 rpm. Evaporation losses can be reduced by maintaining a humid atmosphere; as an alternative, a mathematical correction should be carried out for the evaporation losses.

[0555] If genetically modified clones are examined, an unmodified control clone, or a control clone, which contains the basic plasmid without insertion, should also be included in the tests. If a transgenic sequence is expressed, a control clone should advantageously again be included in these tests. The medium is advantageously inoculated to an OD600 of 0.5 to 1.5 using cells which have been grown on agar plates, such as CM plates (10 g/l glucose, 2.5 g/l NaCl, 2 g/l urea, 10 g/l polypeptone, 5 g/l yeast extract, 5 g/l meat extract, 22 g/l agar, pH value 6.8 established with 2M NaOH), which have been incubated at 30° C. The media are inoculated either by introducing a saline solution of C. glutamicum cells from CM plates or by addition of a liquid preculture of this bacterium.

### Example 7

### In-Vitro Analysis of the Function of the Proteins Encoded by the Transformed Sequences

[0556] The determination of the activities and kinetic parameters of enzymes is well known in the art. Experiments for determining the activity of a specific modified enzyme must be adapted to the specific activity of the wild-enzyme type, which is well within the capabilities of the skilled worker. Overviews of enzymes in general and specific details regarding the structure, kinetics, principles, methods, applications and examples for the determination of many enzyme activities can be found for example in the following literature: Dixon, M., and Webb, E. C: (1979) Enzymes, Longmans, London; Fersht (1985) Enzyme Structure and Mechanism, Freeman, New York; Walsh (1979) Enzymatic Reaction Mechanisms. Freeman, San Francisco; Price, N. C., Stevens, L. (1982) Fundamentals of Enzymology. Oxford Univ. Press: Oxford; Boyer, P. D: Ed. (1983) The Enzymes, 3rd Ed. Academic Press, New York; Bisswanger, H. (1994) Enzymkinetik, 2nd Ed. VCH, Weinheim (ISBN 3527300325); Bergmeyer, H. U., Bergmeyer, J., Graβl, M. Ed. (1983-1986) Methods of Enzymatic Analysis, 3rd Ed. Vol. I-XII, Verlag Chemie: Weinheim; and Ullmann's Encyclopedia of Industrial Chemistry (1987) Vol. A9, “Enzymes”, VCH, Weinheim, pp. 352-363.

### Example 8

### Analysis of the Effect of the Nucleic Acid Molecule on the Production of the Amino Acids

[0557] The effect of the genetic modification in C. glutamicum on the production of an amino acid can be determined by growing the modified microorganisms under suitable conditions (such as those described above) and analyzing the medium and/or the cellular components for the increased production of the amino acid. Such analytical techniques are well known to the skilled worker and encompass spectroscopy, thin-layer chromatography, various types of staining methods, enzymatic and microbiological methods and analytical chromatography such as high-performance liquid chromatography (see, for example, Ullman, Encyclopedia of Industrial Chemistry, Vol. A2, pp. 89-90 and pp. 443-613, VCH: Weinheim (1985); Fallon, A., et al., (1987) “Applications of HPLC in Biochemistry” in: Laboratory Techniques in Biochemistry and Molecular Biology, Vol. 17; Rehm et al. (1993) Biotechnology, Vol. 3, Chapter III: “Product recovery and purification”, pp. 469-714, VCH: Weinheim; Belter, P. A. et al. (1988) Bioseparations: downstream processing for Biotechnology, John Wiley and Sons; Kennedy, J. F. and Cabral, J. M. S. (1992) Recovery processes for biological Materials, John Wiley and Sons; Shaeiwitz, J. A. and Henry, J. D. (1988) Biochemical Separations, in Ullmann's Encyclopedia of Industrial Chemistry, Vol. B3; chapter 11, pp. 1-27, VCH: Weinheim; and Dechow, F. J. (1989) Separation and purification techniques in biotechnology, Noyes Publications).

[0558] In addition to the determination of the fermentation end product, other components of the metabolic pathways which are used for the production of the desired compound, such as intermediates and by-products, may also be analyzed in order to determine the total productivity of the organism, the yield and/or production efficiency of the compound. The analytical methods encompass determining the amounts of nutrients in the medium (for example sugars, hydrocarbons, nitrogen sources, phosphate and other ions), determining biomass composition and growth, analyzing the production of ordinary metabolites from biosynthetic pathways and measuring gases generated during the fermentation. Standard methods for these are described in Applied Microbial Physiology; A Practical Approach, P. M. Rhodes and P. F. Stanbury, Ed. IRL Press, pp. 103-129; 131-163 and 165-192 (ISBN: 0199635773) and the references cited therein.

### Example 9

### Purification of the Amino Acid

[0559] The amino acid can be recovered from cells or from the supernatant of the above-described culture by a variety of methods known in the art. For example, the culture supernatant is recovered first. To this end, the cells are harvested from the culture by slow centrifugation. Cells can generally be disrupted or lysed by standard techniques such as mechanical force or sonication. The cell debris is removed by centrifugation and the supernatant fraction, if appropriate together with the culture supernatant, is used for the further purification of the amino acid. However, it is also possible to process the supernatant alone if the amino acid is present in the supernatant in sufficiently high a concentration. In this case, the amino acid, or the amino acid mixture, can be purified further for example via extraction and/or salt precipitation or via ion-exchange chromatography.

[0560] If required and desired, further chromatography steps with a suitable resin may follow, the amino acid, but not many contaminants in the sample, being retained on the chromatography resin or the contaminants, but not the sample with the product (amino acid), being retained on the resin. If necessary, these chromatography steps may be repeated, using identical or other chromatography resins. The skilled worker is familiar with the selection of suitable chromatography resin and the most effective use for a particular molecule to be purified. The purified product can be concentrated by filtration or ultrafiltration and stored at a temperature at which maximum product stability is ensured. Many purification methods, which are not limited to the above purification method are known in the art. They are described, for example, in Bailey, J. E. & Ollis, D. F. Biochemical Engineering Fundamentals, McGraw-Hill: New York (1986).

[0561] Identity and purity of the amino acid isolated can be determined by standard techniques of the art. They encompass high-performance liquid chromatography (HPLC), spectroscopic methods, mass spectrometry (MS), staining methods, thin-layer chromatography, NIRS, enzyme assay or microbiological assays. These analytical methods are compiled in: Patek et al. (1994) Appl. Environ. Microbiol. 60: 133-140; Malakhova et al. (1996) Biotekhnologiya 11: 27-32; and Schmidt et al. (1998) Bioprocess Engineer. 19: 67-70. Ulmann's Encyclopedia of Industrial Chemistry (1996) Vol. A27, VCH: Weinheim, pp. 89-90, pp. 521-540, pp. 540-547, pp. 559-566, 575-581 and pp. 581-587; Michal, G (1999) Biochemical Pathways: An Atlas of Biochemistry and Molecular Biology, John Wiley and Sons; Fallon, A. et al. (1987) Applications of HPLC in Biochemistry in: Laboratory Techniques in Biochemistry and Molecular Biology, Vol. 17.

### Example 10

### Cloning SEQ ID NO: 1 for the Expression in Plants

[0562] Unless otherwise specified, standard methods as described in Sambrook et al., Molecular Cloning: A laboratory manual, Cold Spring Harbor 1989, Cold Spring Harbor Laboratory Press are used.

[0563] SEQ ID NO: 1 is amplified by PCR as described in the protocol of the Pfu Turbo or DNA Herculase polymerase (Stratagene).

[0564] The composition for the protocol of the Pfu Turbo DNA polymerase was as follows: 1×PCR buffer (Stratagene), 0.2 mM of each dNTP, 100 ng genomic DNA of Saccharomyces cerevisiae (strain S288C; Research Genetics, Inc., now Invitrogen) or Escherichia coli (strain MG1655; E. coli Genetic Stock Center), 50 pmol forward primer, 50 pmol reverse primer, 2.5 u Pfu Turbo DNA polymerase. The amplification cycles were as follows:
[0565] 1 cycle of 3 minutes at 94-95° C., followed by 25-36 cycles of in each case 1 minute at 95° C. or 30 seconds at 94° C., 45 seconds at 50° C., 30 seconds at 50° C. or 30 seconds at 55° C. and 210-480 seconds at 72° C., followed by 1 cycle of 8 minutes at 72° C., then 4° C.

[0566] The composition for the protocol of the Herculase polymerase was as follows: 1×PCR buffer (Stratagene), 0.2 mM of each dNTP, 100 ng genomic DNA of Saccharomyces cerevisiae (strain S288C; Research Genetics, Inc., now Invitrogen) or Escherichia coli (strain MG1655; E. coli Genetic Stock Center), 50 pmol forward primer, 50 pmol reverse primer, 2.5 u Herculase polymerase. The amplification cycles were as follows:

[0567] 1 cycle of 2-3 minutes at 94° C., followed by 25-30 cycles of in each case 30 seconds at 94° C., 30 seconds at 55-60° C. and 5-10 minutes at 72° C., followed by 1 cycle of 10 minutes at 72° C., then 4° C.

[0568] The following primer sequences were selected for the gene SEQ ID NO: 1:

i) forward primer

(SEQ ID NO: 53)

5′-ATGTCTGAAAAGGCCGTTAGAAGG-3′
ii) reverse primer

(SEQ ID NO: 54)

5′-TTATAAAATTATGCAACAGTTAGCCC-3′

[0569] Thereafter, the amplificate was purified over QlAquick columns following the standard protocol (Qiagen).

[0570] For the cloning of PCR-products, produced by Pfu Turbo DNA polymerase, the vector DNA (30 ng) was restricted with SmaI following the standard protocol (MBI Fermentas) and stopped by addition of high-salt buffer. The restricted vector fragments were purified via Nucleobond columns using the standard protocol (Macherey-Nagel). Thereafter, the linearized vector was dephosphorylated following the standard protocol (MBI Fermentas).

[0571] The PCR-products, produced by Pfu Turbo DNA polymerase, were directly cloned into the processed binary vector.

[0572] The DNA termini of the PCR-products, produced by Herculase DNA polymerase, were blunted in a second synthesis reaction using Pfu Turbo DNA polymerase. The composition for the protocol of the blunting the DNA-termini was as follows: 0.2 mM blunting dTTP and 1.25 u Pfu Turbo DNA polymerase. The reaction was incubated at 72° C. for 30 minutes. Then the PCR-products were cloned into the processed vector as well.

[0573] A binary vector comprising a selection cassette (promoter, selection marker, terminator) and an expression cassette with promoter, cloning cassette and terminator sequence between the T-DNA border sequences was used. In addition to those within the cloning cassette, the binary vector has no SmaI cleavage site. Binary vectors which can be used are known to the skilled worker; an overview of binary vectors and their use can be found in Hellens, R., Mullineaux, P. and Klee H., [(2000) “A guide to Agrobacterium binary vectors”, Trends in Plant Science, Vol. 5 No. 10, 446-451. Depending on the vector used, cloning may advantageously also be carried out via other restriction enzymes. Suitable advantageous cleavage sites can be added to the ORF by using suitable primers for the PCR amplification.

[0574] Approximately 30 ng of prepared vector and a defined amount of prepared amplificate were mixed and ligated by addition of ligase.

[0575] The ligated vectors were transformed in the same reaction vessel by addition of competent E. coli cells (strain DH5alpha) and incubation for 20 minutes at 1° C. followed by a heat shock for 90 seconds at 42° C. and cooling to 4° C. Then, complete medium (SOC) was added and the mixture was incubated for 45 minutes at 37° C. The entire mixture was subsequently plated onto an agar plate with antibiotics (selected as a function of the binary vector used) and incubated overnight at 37° C.

[0576] The outcome of the cloning step was verified by amplification with the aid of primers which bind upstream and downstream of the integration site, thus allowing the amplification of the insertion. In addition combinations of the above mentioned gene specific primers and upstream and downstream primers were used in PCR reactions to identify clones with the correct insert orientation. The amplifications were carried as described in the protocol of Taq DNA polymerase (Gibco-BRL).

[0577] The amplification cycles were as follows: 1 cycle of 5 minutes at 94° C., followed by 35 cycles of in each case 15 seconds at 94° C., 15 seconds at 50-66° C. and 5 minutes at 72° C., followed by 1 cycle of 10 minutes at 72° C., then 4° C.

[0578] Several colonies were checked, but only one colony for which a PCR product of the expected size was detected was used in the following steps.

[0579] A portion of this positive colony was transferred into a reaction vessel filled with complete medium (LB) and incubated overnight at 37° C. The LB medium contained an antibiotic chosen to suit the binary vector (see above) used and the resistance gene present therein in order to select the clone.

[0580] The plasmid preparation was carried out as specified in the Qiaprep standard protocol (Qiagen).

### Example 11

### Generation of Transgenic Plants which Express SEQ ID NO: 1

[0581] 1 ng of the plasmid DNA isolated was transformed by electroporation into competent cells of Agrobacterium tumefaciens, of strain GV 3101 pMP90 (Koncz and Schell, Mol. Gen. Gent. 204, 383-396, 1986). The choice of the agrobacterial strain depends on the choice of the binary vector. An overview of possible strains and their properties is found in Hellens, R., Mullineaux, P. and Klee H., (2000)” A guide to Agrobacterium binary vectors, Trends in Plant Science, Vol. 5 No. 10, 446-451. Thereafter, complete medium (YEP) was added and the mixture was transferred into a fresh reaction vessel for 3 hours at 28° C. Thereafter, all of the reaction mixture was plated onto YEP agar plates supplemented with the respective antibiotics, for example rifampicin and gentamycin for GV3101 pMP90, and a further antibiotic for the selection onto the binary vector, was plated, and incubated for 48 hours at 28° C.

[0582] The agrobacteria generated in Example 10, which contains the plasmid construct were then used for the transformation of plants.

[0583] A colony was picked from the agar plate with the aid of a pipette tip and taken up in 3 ml of liquid TB medium, which also contained suitable antibiotics, depending on the agrobacterial strain and the binary plasmid. The preculture was grown for 48 hours at 28° C. and 120 rpm.

[0584] 400 ml of LB medium containing the same antibiotics as above were used for the main culture. The preculture was transferred into the main culture. It was grown for 18 hours at 28° C. and 120 rpm. After centrifugation at 4000 rpm, the pellet was resuspended in infiltration medium (MS medium, 10% sucrose).

[0585] In order to grow the plants for the transformation, dishes (Piki Saat 80, green, provided with a screen bottom, 30×20×4.5 cm, from Wiesauplast, Kunststofftechnik, Germany) were half-filled with a GS 90 substrate (standard soil, Werkverband E.V., Germany). The dishes were watered overnight with 0.05% Proplant solution (Chimac-Apriphar, Belgium). Arabidopsis thaliana C24 seeds (Nottingham Arabidopsis Stock Centre, UK; NASC Stock N906) were scattered over the dish, approximately 1000 seeds per dish. The dishes were covered with a hood and placed in the stratification facility (8 h, 110μ μmol/m²/s⁻¹, 22° C.; 16 h, dark, 6° C.). After 5 days, the dishes were placed into the short-day controlled environment chamber (8 h 130 μmol/m²/s⁻¹, 22° C.; 16 h, dark 20° C.), where they remained for approximately 10 days until the first true leaves had formed.

[0586] The seedlings were transferred into pots containing the same substrate (Teku pots, 7 cm, LC series, manufactured by Pöppelmann GmbH & Co, Germany). Five plants were pricked out into each pot. The pots were then returned into the short-day controlled environment chamber for the plant to continue growing.

[0587] After 10 days, the plants were transferred into the greenhouse cabinet (supplementary illumination, 16 h, 340 μE, 22° C.; 8 h, dark, 20° C.), where they were allowed to grow for further 17 days.

[0588] For the transformation, 6-week-old Arabidopsis plants which had just started flowering were immersed for 10 seconds into the above-described agrobacterial suspension which had previously been treated with 10 μl Silwett L77 (Crompton S.A., Osi Specialties, Switzerland). The method in question is described in Clough and Bent, 1998 (Clough, J C and Bent, A F. 1998 Floral dip: a simplified method for Agrobacterium-mediated transformation of Arabidopsis thaliana, Plant J. 16:735-743.

[0589] The plants were subsequently placed for 18 hours into a humid chamber. Thereafter, the pots were returned to the greenhouse for the plants to continue growing. The plants remained in the greenhouse for another 10 weeks until the seeds were ready for harvesting.

[0590] Depending on the resistance marker used for the selection of the transformed plantsthe harvested seeds were planted in the greenhouse and subjected to a spray selection or else first sterilized and then grown on agar plates supplemented with the respective selection agent. In case of BASTA®-resistance, plantlets were sprayed four times at an interval of 2 to 3 days with 0.02% BASTA® and transformed plants were allowed to set seeds. The seeds of the transgenic A. thaliana plants were stored in the freezer (at −20° C.).

### Example 12

### Plant Culture for Bioanalytical Analyses

[0591] For the bioanalytical analyses of the transgenic plants, the latter were grown uniformly a specific culture facility. To this end the GS-90 substrate as the compost mixture was introduced into the potting machine (Laible System GmbH, Singen, Germany) and filled into the pots. Thereafter, 35 pots were combined in one dish and treated with Previcur. For the treatment, 25 ml of Previcur were taken up in 10 l of tap water. This amount was sufficient for the treatment of approximately 200 pots. The pots were placed into the Previcur solution and additionally irrigated overhead with tap water without Previcur. They were used within four days.

[0592] For the sowing, the seeds, which had been stored in the refrigerator (at −20° C.), were removed from the Eppendorf tubes with the aid of a toothpick and transferred into the pots with the compost. In total, approximately 5 to 12 seeds were distributed in the middle of the pot.

[0593] After the seeds had been sown, the dishes with the pots were covered with matching plastic hood and placed into the stratification chamber for 4 days in the dark at 4° C. The humidity was approximately 90%. After the stratification, the test plants were grown for 22 to 23 days at a 16-h-light, 8-h-dark rhythm at 20° C., an atmospheric humidity of 60% and a CO₂ concentration of approximately 400 ppm. The light sources used were Powerstar HQI-T 250 W/D Daylight lamps from Osram, which generate a light resembling the solar color spectrum with a light intensity of approximately 220 μE/m2/s-1.

[0594] When the plants were 8, 9 and 10 days old, they were subjected to selection for the resistance marker Approximately 1400 pots with transgenic plants were treated with 1 l 0.015% vol/vol of Basta® (Glufosinate-ammonium) solution in water (Aventis Cropsience, GermanyAfter a further 3 to 4 days, the transgenic, resistant seedlings (plantlets in the 4-leaf stage) could be distinguished clearly from the untransformed plantlets. The nontransgenic seedlings were bleached or dead. The transgenic resistance plants were thinned when they had reached the age of 14 days. The plants, which had grown best in the center of the pot were considered the target plants. All the remaining plants were removed carefully with the aid of metal tweezers and discarded.

[0595] During their growth, the plants received overhead irrigation with distilled water (onto the compost) and bottom irrigation into the placement grooves. Once the grown plants had reached the age of 23 days, they were harvested.

### Example 13

### Metabolic Analysis of Transformed Plants

[0596] The modifications identified in accordance with the invention, in the content of above-described metabolites, were identified by the following procedure.

a) Sampling and Storage of the Samples

[0597] Sampling was performed directly in the controlled-environment chamber. The plants were cut using small laboratory scissors, rapidly weighed on laboratory scales, transferred into a pre-cooled extraction sleeve and placed into an aluminum rack cooled by liquid nitrogen. If required, the extraction sleeves can be stored in the freezer at −80° C. The time elapsing between cutting the plant to freezing it in liquid nitrogen amounted to not more than 10 to 20 seconds.

b) Lyophilization

[0598] During the experiment, care was taken that the plants either remained in the deep-frozen state (temperatures<−40° C.) or were freed from water by lyophilization until the first contact with solvents.

[0599] The aluminum rack with the plant samples in the extraction sleeves was placed into the pre-cooled (−40° C.) lyophilization facility. The initial temperature during the main drying phase was −35° C. and the pressure was 0.120 mbar. During the drying phase, the parameters were altered following a pressure and temperature program. The final temperature after 12 hours was +30° C. and the final pressure was 0.001 to 0.004 mbar. After the vacuum pump and the refrigerating machine had been switched off, the system was flushed with air (dried via a drying tube) or argon.

c) Extraction

[0600] Immediately after the lyophilization apparatus had been flushed, the extraction sleeves with the lyophilized plant material were transferred into the 5 ml extraction cartridges of the ASE device (Accelerated Solvent Extractor ASE 200 with Solvent Controller and AutoASE software (DIONEX)).

[0601] The 24 sample positions of an ASE device (Accelerated Solvent Extractor ASE 200 with Solvent Controller and AutoASE software (DIONEX)) were filled with plant samples, including some samples for testing quality control.

[0602] The polar substances were extracted with approximately 10 ml of methanol/water (80/20, v/v) at T=70° C. and p=140 bar, 5 minutes heating-up phase, 1 minute static extraction. The more lipophilic substances were extracted with approximately 10 ml of methanol/dichloromethane (40/60, v/v) at T=70° C. and p=140 bar, 5 minute heating-up phase, 1 minute static extraction. The two solvent mixtures were extracted into the same glass tubes (centrifuge tubes, 50 ml, equipped with screw cap and pierceable septum for the ASE (DIONEX)).

[0603] The solution was treated with internal standards: ribitol, L-glycine-2,2-d₂, L-alanine-2,3,3,3-d₄, methionine-methyl-d₃, and α-methylglucopyranoside and methyl nonadecanoate, methyl undecanoate, methyl tridecanoate, methyl pentadecanoate, methyl nonacosanoate.

[0604] The total extract was treated with 8 ml of water. The solid residue of the plant sample and the extraction sleeve were discarded.

[0605] The extract was shaken and then centrifuged for 5 to 10 minutes at at least 1400 g in order to accelerate phase separation. 1 ml of the supernatant methanol/water phase (“polar phase”, colorless) was removed for the further GC analysis, and 1 ml was removed for the LC analysis. The remainder of the methanol/water phase was discarded. 0.5 ml of the organic phase (“lipid phase”, dark green) was removed for the further GC analysis and 0.5 ml was removed for the LC analysis. All the portions removed were evaporated to dryness using the IR Dancer infrared vacuum evaporator (Hettich). The maximum temperature during the evaporation process did not exceed 40° C. Pressure in the apparatus was not less than 10 mbar.

d) Processing the Lipid Phase for the LC/MS or LC/MS/MS Analysis

[0606] The lipid extract, which had been evaporated to dryness was taken up in mobile phase. The HPLC was run with gradient elution.

[0607] The polar extract, which had been evaporated to dryness was taken up in mobile phase. The HPLC was run with gradient elution.

e) Derivatization of the Lipid Phase for the GC/MS Analysis

[0608] For the transmethanolysis, a mixture of 140 μl of chloroform, 37 μl of hydrochloric acid (37% by weight HCl in water), 320 μl of methanol and 20 μl of toluene was added to the evaporated extract. The vessel was sealed tightly and heated for 2 hours at 100° C., with shaking. The solution was subsequently evaporated to dryness. The residue was dried completely.

[0609] The methoximation of the carbonyl groups was carried out by reaction with methoxyamine hydrochloride (5 mg/ml in pyridine, 100 μl for 1.5 hours at 60° C.) in a tightly sealed vessel. 20 μl of a solution of odd-numbered, straight-chain fatty acids (solution of each 0.3 mg/mL of fatty acids from 7 to 25 carbon atoms and each 0.6 mg/mL of fatty acids with 27, 29 and 31 carbon atoms in 3/7 (v/v) pyridine/toluene) were added as time standards. Finally, the derivatization with 100 μl of N-methyl-N-(trimethylsilyl)-2,2,2-trifluoroacetamide (MSTFA) was carried out for 30 minutes at 60° C., again in the tightly sealed vessel. The final volume before injection into the GC was 220 μl.

f) Derivatization of the Polar Phase for the GC/MS Analysis

[0610] The methoximation of the carbonyl groups was carried out by reaction with methoxyamine hydrochloride (5 mg/ml in pyridine, 50 μl for 1.5 hours at 60° C.) in a tightly sealed vessel. 10 μl of a solution of odd-numbered, straight-chain fatty acids (solution of each 0.3 mg/mL of fatty acids from 7 to 25 carbon atoms and each 0.6 mg/mL of fatty acids with 27, 29 and 31 carbon atoms in 3/7 (v/v) pyridine/toluene) were added as time standards. Finally, the derivatization with 50 μl of N-methyl-N-(trimethylsilyl)-2,2,2-trifluoroacetamide (MSTFA) was carried out for 30 minutes at 60° C., again in the tightly sealed vessel. The final volume before injection into the GC was 110 μl.

g) Analysis of the Various Plant Samples

[0611] The samples were measured in individual series of 20 plant samples each (also referred to as sequences), each sequence containing at least 5 wild-type plants as controls. The peak area of each analyte was divided by the peak area of the respective internal standard. The data were standardized for the fresh weight established for the plant. The values calculated thus were related to the wild-type control group by being divided by the mean of the corresponding data of the wild-type control group of the same sequence. The values obtained were referred to as ratio_by_WT, they are comparable between sequences and indicate how much the analyte concentration in the mutant differs in relation to the wild-type control. Appropiate controls were done before to proof that the vector and transformation procedure itself has no significant influence on the metabolic composition of the plants. Therefore the desribed changes in comparison with wildtypes were caused by the introduced genes.

[0612] As an alternative, the amino acids can be detected advantageously via HPLC separation in ethanolic extract as described by Geigenberger et al. (Plant Cell & Environ, 19, 1996: 43-55).

[0613] The results of the different plant analyses can be seen from the table 1.

[0614] Column 1 in Table 1 shows the amino acid analyzed. Columns 3 and 4 shows the ratio of the analyzed amino acid between the transgenic plants and the wild type; Increase of the metabolites: Max: maximal x-fold (normalised to wild type)−Min: minimal x-fold (normalised to wild type). Decrease of the metabolites: Max: maximal x-fold (normalised to wild type) (minimal decrease), Min: minimal x-fold (normalised to wild type) (maximal decrease). Column 2 indicates the analytical method.

[0615] When the analyses were repeated independently, all results proved to be significant.

### Example 14a

### Engineering Ryegrass Plants by Over-Expressing YNL090W, e.g. from Saccharomyces cerevisiae or Plants

[0616] Seeds of several different ryegrass varieties can be used as explant sources for transformation, including the commercial variety Gunne available from Svalof Weibull seed company or the variety Affinity. Seeds are surface-sterilized sequentially with 1% Tween-20 for 1 minute, 100% bleach for 60 minutes, 3 rinses with 5 minutes each with de-ionized and distilled H2O, and then germinated for 3-4 days on moist, sterile filter paper in the dark. Seedlings are further sterilized for 1 minute with 1% Tween-20, 5 minutes with 75% bleach, and rinsed 3 times with ddH₂O, 5 min each.

[0617] Surface-sterilized seeds are placed on the callus induction medium containing Murashige and Skoog basal salts and vitamins, 20 g/l sucrose, 150 mg/l asparagine, 500 mg/l casein hydrolysate, 3 g/l Phytagel, 10 mg/l BAP, and 5 mg/l dicamba. Plates are incubated in the dark at 25° C. for 4 weeks for seed germination and embryogenic callus induction.

[0618] After 4 weeks on the callus induction medium, the shoots and roots of the seedlings are trimmed away, the callus is transferred to fresh media, is maintained in culture for another 4 weeks, and is then transferred to MSO medium in light for 2 weeks. Several pieces of callus (11-17 weeks old) are either strained through a 10 mesh sieve and put onto callus induction medium, or are cultured in 100 ml of liquid ryegrass callus induction media (same medium as for callus induction with agar) in a 250 ml flask. The flask is wrapped in foil and shaken at 175 rpm in the dark at 23° C. for 1 week. Sieving the liquid culture with a 40-mesh sieve is collected the cells. The fraction collected on the sieve is plated and is cultured on solid ryegrass callus induction medium for 1 week in the dark at 25° C. The callus is then transferred to and is cultured on MS medium containing 1% sucrose for 2 weeks.

[0619] Transformation can be accomplished with either Agrobacterium or with particle bombardment methods. An expression vector is created containing a constitutive plant promoter and the cDNA of the gene in a pUC vector. The plasmid DNA is prepared from E. coli cells using with Qiagen kit according to manufacturer's instruction. Approximately 2 g of embryogenic callus is spread in the center of a sterile filter paper in a Petri dish. An aliquot of liquid MSO with 10 g/l sucrose is added to the filter paper. Gold particles (1.0 μm in size) are coated with plasmid DNA according to method of Sanford et al., 1993 and are delivered to the embryogenic callus with the following parameters: 500 μg particles and 2 μg DNA per shot, 1300 psi and a target distance of 8.5 cm from stopping plate to plate of callus and 1 shot per plate of callus.

[0620] After the bombardment, calli are transferred back to the fresh callus development medium and maintained in the dark at room temperature for a 1-week period. The callus is then transferred to growth conditions in the light at 25° C. to initiate embryo differentiation with the appropriate selection agent, e.g. 250 nM Arsenal, 5 mg/l PPT or 50 mg/L Kanamycin. Shoots resistant to the selection agent are appearing and once rooted are transferred to soil.

[0621] Samples of the primary transgenic plants (T0) are analyzed by PCR to confirm the presence of T-DNA. These results are confirmed by Southern hybridization in which DNA is electrophoresed on a 1% agarose gel and transferred to a positively charged nylon membrane (Roche Diagnostics). The PCR DIG Probe Synthesis Kit (Roche Diagnostics) is used to prepare a digoxigenin-labelled probe by PCR, and used as recommended by the manufacturer.

[0622] Transgenic T0 ryegrass plants are propagated vegetatively by excising tillers. The transplanted tillers are maintained in the greenhouse for 2 months until well established. The shoots are defoliated and allowed to grow for 2 weeks.

### Example 14

### Engineering Soybean Plants by Over-Expressing YNL090W, e.g. from Saccharomyces cerevisiae or Plants

[0623] Soybean can be transformed according to the following modification of the method described in the Texas A&M patent U.S. Pat. No. 5,164,310. Several commercial soybean varieties are amenable to transformation by this method. The cultivar Jack (available from the Illinois Seed Foundation) is commonly used for transformation. Seeds are sterilized by immersion in 70% (v/v) ethanol for 6 min and in 25% commercial bleach (NaOCl) supplemented with 0.1% (v/v) Tween for 20 min, followed by rinsing 4 times with sterile double distilled water. Removing the radicle, hypocotyl and one cotyledon from each seedling propagates seven-day seedlings. Then, the epicotyl with one cotyledon is transferred to fresh germination media in petri dishes and incubated at 25° C. under a 16-hr photoperiod (approx. 100 μE-m-2s-1) for three weeks. Axillary nodes (approx. 4 mm in length) are cut from 3-4 week-old plants. Axillary nodes are excised and incubated in Agrobacterium LBA4404 culture.

[0624] Many different binary vector systems have been described for plant transformation (e.g. An, G. in Agrobacterium Protocols. Methods in Molecular Biology vol 44, pp 47-62, Gartland K M A and M R Davey eds. Humana Press, Totowa, N.J.). Many are based on the vector pBIN19 described by Bevan (Nucleic Acid Research. 1984. 12:8711-8721) that includes a plant gene expression cassette flanked by the left and right border sequences from the Ti plasmid of Agrobacterium tumefaciens. A plant gene expression cassette consists of at least two genes—a selection marker gene and a plant promoter regulating the transcription of the cDNA or genomic DNA of the trait gene. Various selection marker genes can be used as described above, including the Arabidopsis gene encoding a mutated acetohydroxy acid synthase (AHAS) enzyme (U.S. Pat. Nos. 57,673,666 and 6,225,105). Similarly, various promoters can be used to regulate the trait gene to provide constitutive, developmental, tissue or environmental regulation of gene transcription as described above. In this example, the 34S promoter (GenBank Accession numbers M59930 and X16673) is used to provide constitutive expression of the trait gene.

[0625] After the co-cultivation treatment, the explants are washed and transferred to selection media supplemented with 500 mg/L timentin. Shoots are excised and placed on a shoot elongation medium. Shoots longer than 1 cm are placed on rooting medium for two to four weeks prior to transplanting to soil.

[0626] The primary transgenic plants (T0) are analyzed by PCR to confirm the presence of T-DNA. These results are confirmed by Southern hybridization in which DNA is electrophoresed on a 1% agarose gel and transferred to a positively charged nylon membrane (Roche Diagnostics). The PCR DIG Probe Synthesis Kit (Roche Diagnostics) is used to prepare a digoxigenin-labelled probe by PCR, and is used as recommended by the manufacturer.

### Example 14c

### Engineering Corn Plants by Over-Expressing YNL090W, e.g. from Saccharomyces cerevisiae or Plants

[0627] Transformation of maize (Zea Mays L.) is performed with a modification of the method described by Ishida et al. (1996. Nature Biotech 14745-50). Transformation is genotype-dependent in corn and only specific genotypes are amenable to transformation and regeneration. The inbred line A188 (University of Minnesota) or hybrids with A188 as a parent are good sources of donor material for transformation (Fromm et al. 1990 Biotech 8:833-839), but other genotypes can be used successfully as well. Ears are harvested from corn plants at approximately 11 days after pollination (DAP) when the length of immature embryos is about 1 to 1.2 mm. Immature embryos are co-cultivated with Agrobacterium tumefaciens that carry “super binary” vectors and transgenic plants are recovered through organogenesis. The super binary vector system of Japan Tobacco is described in WO patents WO94/00977 and WO95/06722. Vectors can be constructed as described. Various selection marker genes can be used including the maize gene encoding a mutated acetohydroxy acid synthase (AHAS) enzyme (U.S. Pat. No. 6,025,541). Similarly, various promoters can be used to regulate the trait gene to provide constitutive, developmental, tissue or environmental regulation of gene transcription. In this example, the 34S promoter (GenBank Accession numbers M59930 and X16673) is used to provide constitutive expression of the trait gene.

[0628] Excised embryos are grown on callus induction medium, then maize regeneration medium, containing imidazolinone as a selection agent. The Petri plates are incubated in the light at 25° C. for 2-3 weeks, or until shoots develop. The green shoots are transferred from each embryo to maize rooting medium and incubated at 25° C. for 2-3 weeks, until roots develop. The rooted shoots are transplanted to soil in the greenhouse. T1 seeds are produced from plants that exhibit tolerance to the imidazolinone herbicides and which are PCR positive for the transgenes.

[0629] The T1 generation of single locus insertions of the T-DNA can segregate for the transgene in a 3:1 ratio. Those progeny containing one or two copies of the transgene are tolerant of the imidazolinone herbicide. Homozygous T2 plants can exhibited similar phenotypes as the T1 plants. Hybrid plants (F1 progeny) of homozygous transgenic plants and non-transgenic plants can also exhibited increased similar phenotyps.

### Example 14d

### Engineering Wheat Plants by Over-Expressing YNL090W, e.g. from Saccharomyces cerevisiae or Plants

[0630] Transformation of wheat is performed with the method described by Ishida et al. (1996 Nature Biotech. 14745-50). The cultivar Bobwhite (available from CYMMIT, Mexico) is commonly used in transformation. Immature embryos are co-cultivated with Agrobacterium tumefaciens that carry “super binary” vectors, and transgenic plants are recovered through organogenesis. The super binary vector system of Japan Tobacco is described in WO patents WO94/00977 and WO95/06722. Vectors were constructed as described. Various selection marker genes can be used including the maize gene encoding a mutated acetohydroxy acid synthase (AHAS) enzyme (U.S. Pat. No. 6025541). Similarly, various promoters can be used to regulate the trait gene to provide constitutive, developmental, tissue or environmental regulation of gene transcription. In this example, the 34S promoter (GenBank Accession numbers M59930 and X16673) can be used to provide constitutive expression of the trait gene.

[0631] After incubation with Agrobacterium, the embryos are grown on callus induction medium, then regeneration medium, containing imidazolinone as a selection agent. The Petri plates are incubated in the light at 25° C. for 2-3 weeks, or until shoots develop. The green shoots are transferred from each embryo to rooting medium and incubated at 25° C. for 2-3 weeks, until roots develop. The rooted shoots are transplanted to soil in the greenhouse. T1 seeds are produced from plants that exhibit tolerance to the imidazolinone herbicides and which are PCR positive for the transgenes.

[0632] The T1 generation of single locus insertions of the T-DNA can segregate for the transgene in a 3:1 ratio. Those progeny containing one or two copies of the transgene are tolerant of the imidazolinone herbicide. Homozygous T2 plants exhibited similar phenotypes.

### Example 14e

### Engineering Rapeseed/Canola Plants by Over-Expressing YNL090W, e.g. from Saccharomyces cerevisiae or Plants

[0633] Cotyledonary petioles and hypocotyls of 5-6 day-old young seedlings are used as explants for tissue culture and transformed according to Babic et al. (1998, Plant Cell Rep 17: 183-188). The commercial cultivar Westar (Agriculture Canada) is the standard variety used for transformation, but other varieties can be used.

[0634] Agrobacterium tumefaciens LBA4404 containing a binary vector are used for canola transformation. Many different binary vector systems have been described for plant transformation (e.g. An, G. in Agrobacterium Protocols. Methods in Molecular Biology vol 44, pp 47-62, Gartland K M A and M R Davey eds. Humana Press, Totowa, N.J.). Many are based on the vector pBIN19 described by Bevan (Nucleic Acid Research. 1984. 12:8711-8721) that includes a plant gene expression cassette flanked by the left and right border sequences from the Ti plasmid of Agrobacterium tumefaciens. A plant gene expression cassette consists of at least two genes—a selection marker gene and a plant promoter regulating the transcription of the cDNA or genomic DNA of the trait gene. Various selection marker genes can be used including the Arabidopsis gene encoding a mutated acetohydroxy acid synthase (AHAS) enzyme (U.S. Pat. Nos. 57,673,666 and 6,225,105). Similarly, various promoters can be used to regulate the trait gene to provide constitutive, developmental, tissue or environmental regulation of gene transcription. In this example, the 34S promoter (GenBank Accession numbers M59930 and X16673) can be used to provide constitutive expression of the trait gene.

[0635] Canola seeds are surface-sterilized in 70% ethanol for 2 min., and then in 30% Clorox with a drop of Tween-20 for 10 min, followed by three rinses with sterilized distilled water. Seeds are then germinated in vitro 5 days on half strength MS medium without hormones, 1% sucrose, 0.7% Phytagar at 23° C., 16 hr. light. The cotyledon petiole explants with the cotyledon attached are excised from the in vitro seedlings, and are inoculated with Agrobacterium by dipping the cut end of the petiole explant into the bacterial suspension. The explants are then cultured for 2 days on MSBAP-3 medium containing 3 mg/l BAP, 3% sucrose, 0.7% Phytagar at 23° C., 16 hr light. After two days of co-cultivation with Agrobacterium, the petiole explants are transferred to MSBAP-3 medium containing 3 mg/l BAP, cefotaxime, carbenicillin, or timentin (300 mg/l) for 7 days, and then cultured on MSBAP-3 medium with cefotaxime, carbenicillin, or timentin and selection agent until shoot regeneration. When the shoots are 5-10 mm in length, they are cut and transferred to shoot elongation medium (MSBAP-0.5, containing 0.5 mg/l BAP). Shoots of about 2 cm in length are transferred to the rooting medium (MS0) for root induction.

[0636] Samples of the primary transgenic plants (T0) are analyzed by PCR to confirm the presence of T-DNA. These results are confirmed by Southern hybridization in which DNA is electrophoresed on a 1% agarose gel and are transferred to a positively charged nylon membrane (Roche Diagnostics). The PCR DIG Probe Synthesis Kit (Roche Diagnostics) is used to prepare a digoxigenin-labelled probe by PCR, and used as recommended by the manufacturer.

### Example 14f

### Engineering Alfalfa Plants by Over-Expressing YNL090W Genes, e.g. from Saccharomyces cerevisiae or E. coli or Plants

[0637] A regenerating clone of alfalfa (Medicago sativa) is transformed using the method of (McKersie et al., 1999 Plant Physiol 119: 839-847). Regeneration and transformation of alfalfa is genotype dependent and therefore a regenerating plant is required. Methods to obtain regenerating plants have been described. For example, these can be selected from the cultivar Rangelander (Agriculture Canada) or any other commercial alfalfa variety as described by Brown D C W and A Atanassov (1985. Plant Cell Tissue Organ Culture 4: 111-112). Alternatively, the RA3 variety (University of Wisconsin) has been selected for use in tissue culture (Walker et al., 1978 Am J Bot 65:654-659).

[0638] Petiole explants are cocultivated with an overnight culture of Agrobacterium tumefaciens C58C1 pMP90 (McKersie et al., 1999 Plant Physiol 119: 839-847) or LBA4404 containing a binary vector. Many different binary vector systems have been described for plant transformation (e.g. An, G. in Agrobacterium Protocols. Methods in Molecular Biology vol 44, pp 47-62, Gartland K M A and M R Davey eds. Humana Press, Totowa, N.J.). Many are based on the vector pBIN19 described by Bevan (Nucleic Acid Research. 1984. 12:8711-8721) that includes a plant gene expression cassette flanked by the left and right border sequences from the Ti plasmid of Agrobacterium tumefaciens. A plant gene expression cassette consists of at least two genes—a selection marker gene and a plant promoter regulating the transcription of the cDNA or genomic DNA of the trait gene. Various selection marker genes can be used including the Arabidopsis gene encoding a mutated acetohydroxy acid synthase (AHAS) enzyme (U.S. Pat. Nos. 57,673,666 and 6,225,105). Similarly, various promoters can be used to regulate the trait gene that provides constitutive, developmental, tissue or environmental regulation of gene transcription. In this example, the 34S promoter (GenBank Accession numbers M59930 and X16673) can be used to provide constitutive expression of the trait gene.

[0639] The explants are cocultivated for 3 d in the dark on SH induction medium containing 288 mg/L Pro, 53 mg/L thioproline, 4.35 g/L K2SO4, and 100 μm acetosyringinone. The explants are washed in half-strength Murashige-Skoog medium (Murashige and Skoog, 1962) and plated on the same SH induction medium without acetosyringinone but with a suitable selection agent and suitable antibiotic to inhibit Agrobacterium growth. After several weeks, somatic embryos are transferred to BOi2Y development medium containing no growth regulators, no antibiotics, and 50 g/L sucrose. Somatic embryos are subsequently germinated on half-strength Murashige-Skoog medium. Rooted seedlings are transplanted into pots and grown in a greenhouse.

[0640] The T0 transgenic plants are propagated by node cuttings and rooted in Turface growth medium. The plants are defoliated and grown to a height of about 10 cm (approximately 2 weeks after defoliation).

### Example 14g

### Engineering Alfalfa Plants by Over-Expressing YLR375W Genes, e.g. from Saccharomyces cerevisiae or Plants

[0641] A regenerating clone of alfalfa (Medicago sativa) is transformed using the method of (McKersie et al., 1999 Plant Physiol 119: 839-847). Regeneration and transformation of alfalfa is genotype dependent and therefore a regenerating plant is required. Methods to obtain regenerating plants have been described. For example, these can be selected from the cultivar Rangelander (Agriculture Canada) or any other commercial alfalfa variety as described by Brown D C W and A Atanassov (1985. Plant Cell Tissue Organ Culture 4: 111-112). Alternatively, the RA3 variety (University of Wisconsin) has been selected for use in tissue culture (Walker et al., 1978 Am J Bot 65:654-659).

[0642] Petiole explants are cocultivated with an overnight culture of Agrobacterium tumefaciens C58C1 pMP90 (McKersie et al., 1999 Plant Physiol 119: 839-847) or LBA4404 containing a binary vector. Many different binary vector systems have been described for plant transformation (e.g. An, G. in Agrobacterium Protocols. Methods in Molecular Biology vol 44, pp 47-62, Gartland K M A and M R Davey eds. Humana Press, Totowa, N.J.). Many are based on the vector pBIN19 described by Bevan (Nucleic Acid Research. 1984. 12:8711-8721) that includes a plant gene expression cassette flanked by the left and right border sequences from the Ti plasmid of Agrobacterium tumefaciens. A plant gene expression cassette consists of at least two genes—a selection marker gene and a plant promoter regulating the transcription of the cDNA or genomic DNA of the trait gene. Various selection marker genes can be used including the Arabidopsis gene encoding a mutated acetohydroxy acid synthase (AHAS) enzyme (U.S. Pat. Nos. 57,673,666 and 6,225,105). Similarly, various promoters can be used to regulate the trait gene that provides constitutive, developmental, tissue or environmental regulation of gene transcription. In this example, the 34S promoter (GenBank Accession numbers M59930 and X16673) can be used to provide constitutive expression of the trait gene.

[0643] The explants are cocultivated for 3 d in the dark on SH induction medium containing 288 mg/L Pro, 53 mg/L thioproline, 4.35 g/L K2SO4, and 100 μm acetosyringinone. The explants are washed in half-strength Murashige-Skoog medium (Murashige and Skoog, 1962) and plated on the same SH induction medium without acetosyringinone but with a suitable selection agent and suitable antibiotic to inhibit Agrobacterium growth. After several weeks, somatic embryos are transferred to BOi2Y development medium containing no growth regulators, no antibiotics, and 50 g/L sucrose. Somatic embryos are subsequently germinated on half-strength Murashige-Skoog medium. Rooted seedlings are transplanted into pots and grown in a greenhouse.

[0644] The T0 transgenic plants are propagated by node cuttings and rooted in Turface growth medium. The plants are defoliated and grown to a height of about 10 cm (approximately 2 weeks after defoliation).

[0645] Equivalents

[0646] Those of ordinary skill in the art will recognize, or will be able to ascertain using no more than routine experimentation, many equivalents to the specific embodiments of the invention described herein. Such equivalents are intended to be encompassed by the claims.

The application's sequence listing, which the Patent Office published only in electronic form, follows.

SEQUENCE LISTING (400 sequences)

SEQ ID NO: 1 - DNA, 579 bp, Saccharomyces cerevisiae
  CDS (1)..(579)
atgtctgaaaaggccgttagaaggaaacttgttattattggtgatggtgcttgtggcaagacctctttactatatgtatttacattaggaaaattccctgaacaatatcatccgacagtgttcgagaattatgtcactgattgcagagttgacggaataaaagtgtccttaacgctctgggatacagcgggacaagaggaatatgaacgtttacgtccattctcatattcaaaagcagatataatattaattgggtttgctgtagacaattttgaatcactaattaacgcaaggacgaaatgggcggatgaggcattacgatattgtcctgacgcaccaatcgttcttgtaggcttgaaaaaagatttgaggcaagaagcccattttaaagagaatgctaccgatgaaatggttcccattgaagatgcaaaacaagttgcaagggccattggggccaagaaatacatggaatgtagtgcactgactggtgagggtgtggatgatgtctttgaagtagctacaagaaccagtttgcttatgaagaaggaaccaggggctaactgttgcataattttataa

SEQ ID NO: 2 - protein, 192 aa, Saccharomyces cerevisiae
MSEKAVRRKLVIIGDGACGKTSLLYVFTLGKFPEQYHPTVFENYVTDCRVDGIKVSLTLWDTAGQEEYERLRPFSYSKADIILIGFAVDNFESLINARTKWADEALRYCPDAPIVLVGLKKDLRQEAHFKENATDEMVPIEDAKQVARAIGAKKYMECSALTGEGVDDVFEVATRTSLLMKKEPGANCCIIL

SEQ ID NO: 3 - DNA, 600 bp, Oryza sativa
  CDS (1)..(600)
atgggttgctcctcctccgtgccagctcgaagcactggagggttgaacaatattagcaacgataactccgctactgattcaaaggacttgcgtgctaagttggtattgcttggtgactctggtgtagggaaaagttgcattgttcttcgctttgttcgtggtcagtttgatcccacttccaaggtaactgtcggtgcatcatttttatcacaaacattggctttggaggactcaacaatagtgaaatttgaaatatgggataccgctggacaagagaggtatgctgccttggcacctctttactacagaggagctgctgctgcagttgttgtctacgacataactagtccagaatcatttagcaaagcacaatactgggtgaaggaacttcaaaaacatggtagtcctgatattatcatggttttggttggtaataaagctgatctacatgaaaatcgacatgtatcttctcaggaagcacaagagtatgcagagaagaataatatggttttcatcgagacatcagcaaagacagctgataatataaaccaagtatttgaggaaattgcgaagaggttgcccaggccaacggcgtcttga

SEQ ID NO: 4 - protein, 199 aa, Oryza sativa
MGCSSSVPARSTGGLNNISNDNSATDSKDLRAKLVLLGDSGVGKSCIVLRFVRGQFDPTSKVTVGASFLSQTLALEDSTIVKFEIWDTAGQERYAALAPLYYRGAAAAVVVYDITSPESFSKAQYWVKELQKHGSPDIIMVLVGNKADLHENRHVSSQEAQEYAEKNNMVFIETSAKTADNINQVFEEIAKRLPRPTAS

SEQ ID NO: 5 - DNA, 648 bp, Oryza sativa
  CDS (1)..(648)
atggcgtccagcgcgtcgcggttcatcaagtgcgtcacggtcggggacggcgccgtcggcaagacctgcatgctcatctgctacaccagcaacaagttccccactgattacgtacccactgtttttgacaatttcagtgcaaacgtggtggtcgacggcaccacggtgaatttgggtctctgggatactgcagggcaggaagattacaacagattgaggccgctaagctaccgtggcgccgatgtctttgtgcttgccttctccctagtgagccgagctagctatgagaatgtcatgaagaagtggttaccagagcttcagcattatgcaccaggggtgccaattgtgttggttgggaccaaattggatcttcgtgaagataaacactacttacttgaccatcctagcttggtgcctgtgactacagcacagggagaggaactccgcaagcacattggcgcaacgtgttacatcgaatgcagctcaaagacacagcagaatgtaaaagctgtgtttgatgctgccatcaaggtagtaatcaagcctccaacaaagcagagggacaggaagaagaagaaaacacggcgcggatgttctttcttctgcaagggtgtcatgtccagaagaaggctagtatgcttcaagtga

SEQ ID NO: 6 - protein, 215 aa, Oryza sativa
MASSASRFIKCVTVGDGAVGKTCMLICYTSNKFPTDYVPTVFDNFSANVVVDGTTVNLGLWDTAGQEDYNRLRPLSYRGADVFVLAFSLVSRASYENVMKKWLPELQHYAPGVPIVLVGTKLDLREDKHYLLDHPSLVPVTTAQGEELRKHIGATCYIECSSKTQQNVKAVFDAAIKVVIKPPTKQRDRKKKKTRRGCSFFCKGVMSRRRLVCFK

SEQ ID NO: 7 - DNA, 591 bp, Brassica napus
  CDS (1)..(591)
atgagcgcatcgaggttcataaagtgtgttacagtcggcgatggtgccgtcggaaaaacctgtatgctgatctcttacaccagcaacactttccctacggactatgttccaactgttttcgacaacttcagtgctaacgtggttgttgatgggaacactgtgaatcttggattgtgggatacagctggtcaagaagactataacaggttaagaccattgagttaccgtggtgcagatgtcttcattcttgctttctctcttattagcaaagctagctacgagaacatagccaagaagtggattcctgagctcaggcattatgcccctggagttcctatcattctcgtggggacaaaactcgatcttcgagatgacaagcagttcttcatagaccatcccggtgcagtgccaatcactacaaaccagggagaggaactaaagaaactcataggatctccagtttacattgaatgtagttcaaagacgcagcagaatgtcaaagcagtctttgacgcagctattaaagtggtgcttcagccaccaaaatcaaagaagaagaaaaagaacaagaatcgttgcgttttcttgtga

SEQ ID NO: 8 - protein, 196 aa, Brassica napus
MSASRFIKCVTVGDGAVGKTCMLISYTSNTFPTDYVPTVFDNFSANVVVDGNTVNLGLWDTAGQEDYNRLRPLSYRGADVFILAFSLISKASYENIAKKWIPELRHYAPGVPIILVGTKLDLRDDKQFFIDHPGAVPITTNQGEELKKLIGSPVYIECSSKTQQNVKAVFDAAIKVVLQPPKSKKKKKNKNRCVFL

SEQ ID NO: 9 - DNA, 597 bp, Brassica napus
  CDS (1)..(597)
atgagtgcttcgaggtttatcaagtgtgtcaccgtcggcgacggcgctgtcggaaagacttgtctgctcatctcctacactagcaacactttccccacggactatgtgccaactgtgtttgataatttcagcgcgaatgtgattgtggatgggaacactatcaacttgggattgtgggatactgcagggcaagaggactacaatagactaagaccattgagctatcgcggcgcagatgtcttcttactcgctttctcccttgtcagcaaagctagctatgaaaatgtttctaaaaagtgggtacctgaactgagacattatgctcctggtgttccaatcatcctcgtcggaaccaagcttgatcttcgagatgacaagcaattctttgttgagcaccctggtgctgtgcctatctctactgctcagggtgaagaactgaagaaggtgattggggcacctgcttatattgaatgcagtgcaaaaacacaacagaatgtaaaagcggtgtttgatgcggctatcaaggtagttctccaaccacccaaaaacaagaagaggaagaagagaaagtctcagaaagcttgttctatattgtga

SEQ ID NO: 10 - protein, 198 aa, Brassica napus
MSASRFIKCVTVGDGAVGKTCLLISYTSNTFPTDYVPTVFDNFSANVIVDGNTINLGLWDTAGQEDYNRLRPLSYRGADVFLLAFSLVSKASYENVSKKWVPELRHYAPGVPIILVGTKLDLRDDKQFFVEHPGAVPISTAQGEELKKVIGAPAYIECSAKTQQNVKAVFDAAIKVVLQPPKNKKRKKRKSQKACSIL

SEQ ID NO: 11 - DNA, 591 bp, Glycine max
  CDS (1)..(591)
atgagtacggcaaggtttatcaagtgtgtaacagttggagatggtgctgtgggaaagacatgcatgcttatatcctataccagcaatacctttcccacggattatgttccaacagtgtttgacaatttcagtgctaatgtaacggtggatggtagtactgttaatcttggtttatgggacactgcaggacaagaagattacaacaggctaaggcctttaagctatagaggagctgatgtgtttttgttgtgctattctctcatcagcaaagccagttatgagaacatctccaaaaagtggatacctgagctaagacattatgctccaaatgtgcctatagtgctggtgggaacaaaactagatttgcgagatgacaagcaatttctgattgatcatccgggatccgcacgaataacaactgctcagggtgaagaattgaagaaaatgattggtgcagtcacttatattgagtgcagctccaaaacacagctgaatgtgaagacagtttttgatgctgcaataaaggttgcattgaagccaccaaagccaaagaagaaaccacgcaagaaaaggacctgtactttcctctga

SEQ ID NO: 12 - protein, 196 aa, Glycine max
MSTARFIKCVTVGDGAVGKTCMLISYTSNTFPTDYVPTVFDNFSANVTVDGSTVNLGLWDTAGQEDYNRLRPLSYRGADVFLLCYSLISKASYENISKKWIPELRHYAPNVPIVLVGTKLDLRDDKQFLIDHPGSARITTAQGEELKKMIGAVTYIECSSKTQLNVKTVFDAAIKVALKPPKPKKKPRKKRTCTFL

SEQ ID NO: 13 - DNA, 594 bp, Glycine max
  CDS (1)..(594)
atgagcacaacacggtttattaagtgtgtcacagttggtgatggggctgtgggaaagacttgcatgcttatctcttacactagcaacactttccccacggattatgttcctacagttttcgacaatttcagtgcaaatgttgtggttgatggcagcacagttaacctgggattgtgggacactgctggacaggaagattacaacaggcttaggccattgagttacagaggagcagatgtgttcttgctggccttttccctcatcagcaaagccagctatgaaaatatatctaaaaagtggattcctgaattgagacattatgccccaactgtgcctattgtactggttggaactaaacttgatttgagggaagacaggcaatatttgattgatcatcctggaaccacagctatagctactgcccagggagaagaactgaagaaggcaattggtgctgctgtgtacatagagtgcagctcaaagactcagcagaatgtgaaggccgtgtttgatgctgcaatcaaggttgttttgcaaccacctaagtccaagaaaaaaggaaagaagaagaacacgccttgtgttttcctctga

SEQ ID NO: 14 - protein, 197 aa, Glycine max
MSTTRFIKCVTVGDGAVGKTCMLISYTSNTFPTDYVPTVFDNFSANVVVDGSTVNLGLWDTAGQEDYNRLRPLSYRGADVFLLAFSLISKASYENISKKWIPELRHYAPTVPIVLVGTKLDLREDRQYLIDHPGTTAIATAQGEELKKAIGAAVYIECSSKTQQNVKAVFDAAIKVVLQPPKSKKKGKKKNTPCVFL

SEQ ID NO: 15 - DNA, 591 bp, Glycine max
  CDS (1)..(591)
atgagtgcgtcgaggttcattaagtgcgtcaccgtcggcgacggtgctgtcggcaaaacctgcttgttgatttcctacaccagcaacacttttcccacggactatgtgcccaccgtttttgacaatttcagtgctaatgtggtggtggatggaagcaccgtaaacctaggattgtgggatacagctggtcaggaggattacaatagattaagacccttgagctatcgaggagctgatgtcttcatacttgccttttctctcataagcaaggctagctatgaaaatattgcaaagaagtggatccctgaactaaggcattatgcccctggtgttccaataattctcgttggaacaaagttagatcttcgggatgataagcaattttttatggaccatcctggtgcagtgccaattactacagcacagggagaagaattgagaaagctgattggtgctccggcctacattgagtgtagttccaaaacgcaacagaacgtgaaagctgtctttgacgcggcaatcaaagtggttatccaaccaccaaagctaaagaaaaagagaaaaacacagaaagcttgctccatattatga

SEQ ID NO: 16 - protein, 196 aa, Glycine max
MSASRFIKCVTVGDGAVGKTCLLISYTSNTFPTDYVPTVFDNFSANVVVDGSTVNLGLWDTAGQEDYNRLRPLSYRGADVFILAFSLISKASYENIAKKWIPELRHYAPGVPIILVGTKLDLRDDKQFFMDHPGAVPITTAQGEELRKLIGAPAYIECSSKTQQNVKAVFDAAIKVVIQPPKLKKKRKTQKACSIL

SEQ ID NO: 17 - DNA, 594 bp, Glycine max
  CDS (1)..(594)
atgagcgcttctaggttcatcaagtgcgtcactgttggggatggtgctgtgggcaaaacctgtttgcttatttcctacaccagcaacacttttcccaccgattatgtgccgactgtttttgacaatttcagcgcaaatgtggttgtcaatgggagcattgtgaatctgggtttgtgggatactgctggacaagaggattataacagattaagacctttgagttaccgtggtgccgatgttttcatactggctttctctctcataagcaaggccagttatgaaaatgtctctaaaaagtggattccggagttgaagcattatgctcctggtgtccccattattctggttggcacaaagcttgaccttcgggatgataagcagttctgcattgaccatcctggtgccgtacctattaccacagctcagggagaagagcttaggaagctgattaatgcgccagcttacattgaatgcagttcaaaaacacaggagaacgtgaaggcagtctttgatgcagccataagagttgtccttcaaccacctaagcagaagaaaaagaagggtaaagcacaaaaggcctgttcgatattgtga

SEQ ID NO: 18 - protein, 197 aa, Glycine max
MSASRFIKCVTVGDGAVGKTCLLISYTSNTFPTDYVPTVFDNFSANVVVNGSIVNLGLWDTAGQEDYNRLRPLSYRGADVFILAFSLISKASYENVSKKWIPELKHYAPGVPIILVGTKLDLRDDKQFCIDHPGAVPITTAQGEELRKLINAPAYIECSSKTQENVKAVFDAAIRVVLQPPKQKKKKGKAQKACSIL

SEQ ID NO: 19 - DNA, 594 bp, Glycine max
  CDS (1)..(594)
atgagtgcgtccaggttcatcaagtgtgtcactgtgggtgacggtgccgttggcaagacttgcatgctcatctcctacaccagcaacacttttcctacggactacgtgccaactgtctttgacaatttcagtgcaaatgtcgttgtggatggaagcactgtgaatcttgggttgtgggatactgctggccaagaagattacaatagattgagacccttaagctatcgtggagcagatgtattcctgcttgctttctctctcataagcagggccagctatgaaaatgttgccaagaaatggattcctgagttgaggcattatgctcctggtgttccaattattcttgttggaacaaaacttgatcttcgggatgataagcagttctttcaagaccatcctggtgcagtgcctatcaccacagcacagggtgaggaactgagaaagcttatcggtgctccaatttacattgaatgtagttcaaaaacacaacagaatgtgaaggctgtttttgatgcagccatcaaggtagttctccagcccccaaagcagaagaaaaagaagagaaagggacaaaaggcctgttccattttgtga

SEQ ID NO: 20 - protein, 197 aa, Glycine max
MSASRFIKCVTVGDGAVGKTCMLISYTSNTFPTDYVPTVFDNFSANVVVDGSTVNLGLWDTAGQEDYNRLRPLSYRGADVFLLAFSLISRASYENVAKKWIPELRHYAPGVPIILVGTKLDLRDDKQFFQDHPGAVPITTAQGEELRKLIGAPIYIECSSKTQQNVKAVFDAAIKVVLQPPKQKKKKRKGQKACSIL

SEQ ID NO: 21 - DNA, 594 bp, Glycine max; identical to SEQ ID NO: 19
  CDS (1)..(594)

SEQ ID NO: 22 - protein, 197 aa, Glycine max; identical to SEQ ID NO: 20

SEQ ID NO: 23 - DNA, 639 bp, Glycine max
  CDS (1)..(639)
atggcttccgcaactgccccaagattcatcaagtgcgtgaccgttggtgatggagctgtagggaagacctgcatgctcatttgctataccagcaacaaattccccacggactatatccccactgtgtttgataatttcagtgcaaatgtggttgttgaaggcataactgtcaacttaggcctttgggatacagctgggcaagaggattacaacaggctgaggcccttgagctacaggggggcagatgtctttgtcttggctttttctttagttagtcgcgcgagctatgagaatgtgctgaagaagtggatccctgaactccagcattttgcccctggcatcccgttggtgttagttggcaccaaattggatctacgagaagacaagcactacatggctgatcatcccagcttggtgccagtgactactgatcaaggtgaggaactccgtaaacacattggagctacctactatattgagtgcagctcaaaaactcagcagaatgtgaaggcagtttttgatgctgctattagaatggtcatcaagcctccacaaaagcaaaacgagaaaagaaagaaaaaaccacgtggctgtttcctaaacgtcctctgtcgaaggaacattgttcgccttaaatga

SEQ ID NO: 24 - protein, 212 aa, Glycine max
MASATAPRFIKCVTVGDGAVGKTCMLICYTSNKFPTDYIPTVFDNFSANVVVEGITVNLGLWDTAGQEDYNRLRPLSYRGADVFVLAFSLVSRASYENVLKKWIPELQHFAPGIPLVLVGTKLDLREDKHYMADHPSLVPVTTDQGEELRKHIGATYYIECSSKTQQNVKAVFDAAIRMVIKPPQKQNEKRKKKPRGCFLNVLCRRNIVRLK

SEQ ID NO: 25 - DNA, 762 bp, Brassica napus
  CDS (1)..(762)
atggttggaccaggaagacctcaaatcgtcctcttcggttcatcaatcgttcaatacagcttcagcgatggtggatggggagccactctcgctaacatctactctcgcacggctgacgtaatccttcgtgggtatgctggttggaactccagatctgccttgaaggtgttaaaccaagtgttcccaaaggatgctgttatacaaccttctttggtgatagtctatttcggagggaatgattcaatgcctcctcatccatcagggcaaggacctcatgttcctctctctgaattcactgagaacatgaggaagatcggagagcatcttttgagcctctcggacaagacccgtgtcatttttctcactcccccaccaatgaacgagagacaaatccaactagtgtttggagatgcaatgagaggccggagtaacgagctgtgtcgtccatacgcagaagcgttgttgaatctatgcagagagatcaatgtgaaaggtatcgatctttggaacgcaatacagcaacaagatgattggttacacacttgcttcactgacggtatccatttcacggccaaggcgagcgagattgtggtgaaggagatattgaaagtagtgagagaagctgattggaaaccgagtcttgacaggaagtcattaccggttgagtttccatttgattctggtctaccaaactccccaagacatagtgatctagaattaactagaaacaagaagttggagcctcgtatggcccgattgtaa

SEQ ID NO: 26 - protein, 253 aa, Brassica napus
MVGPGRPQIVLFGSSIVQYSFSDGGWGATLANIYSRTADVILRGYAGWNSRSALKVLNQVFPKDAVIQPSLVIVYFGGNDSMPPHPSGQGPHVPLSEFTENMRKIGEHLLSLSDKTRVIFLTPPPMNERQIQLVFGDAMRGRSNELCRPYAEALLNLCREINVKGIDLWNAIQQQDDWLHTCFTDGIHFTAKASEIVVKEILKVVREADWKPSLDRKSLPVEFPFDSGLPNSPRHSDLELTRNKKLEPRMARL

SEQ ID NO: 27 - DNA, 651 bp, Brassica napus
  CDS (1)..(261)
atggcttcaactgcttcaaagttcataaaatgtgtgactgttggtgatggcgccgtaggtaaaacctgtatgctcatctgctacaccagcaacaaattccctactgactacataccaacagtttttgacaactttagtgcaaacgttgtagttgaaggcaccactgtgaacctaggcctatgggacactgctgggcaagaagactacaacagattaaggcctttaagttacagaggagcagatgttttcgtcctgtctttctccttggtcagccgagctagctacgagaatgtttataaaaagtggatccctgaactccaacactttgccccaggagttccattagtccttgttggtaccaaactagatctccgtgaagataataagcattatttggctgaccatcctggactatcccctgtaactactgcacagggagaggaattgcgtaagctaatcggtgcgacatattacattgaatgtagctcgaaaactcaacagaatgtgaaagcagtttttgattcagcgatcaaggaagtgatcaaaccggtggttaaacaaaaggagaagacgcagaaaacgaagaagcaaaagtctaatcatggctgtttatcaaacgttctgtgtgggaggatagtgactcggcattga

SEQ ID NO: 28 - protein, 87 aa, Brassica napus
MASTASKFIKCVTVGDGAVGKTCMLICYTSNKFPTDYIPTVFDNFSANVVVEGTTVNLGLWDTAGQEDYNRLRPLSYRGADVFVLSF

SEQ ID NO: 29 - DNA, 651 bp, Brassica napus
  CDS (1)..(651)
atggcttcaagtgcttcaaagttcatcaaatgtgtaactgttggtgatggtgccgttggtaaaacctgtatgctcatctgctataccagcaacaagttccctactgactatgtaccaacggtttttgacaactttagtgcaaacgttgtagttgaaggaactactgtgaacttagggctatgggatactgctggacaagaagactataacagattaaggcctttaagctacagaggagcagatgtcttcgtcttgtctttctcattggttagccgagctagctacgagaatgtttttaaaaagtggatccctgaactccaacactttgctccaggagttccattagttcttgtcggtaccaaattagatctccgtgaggataagcattatctggctgaccatcctggactatcccctgtaactactgcacagggagaggagttgcgtaagctcattggtgcaacatattacattgaatgtagctcaaaaactcaacagaatgtcaaagcagtttttgattcggcaatcaaggaagtgatcaaaccggtgcttaaacagaagggcaagaccaagaaaaagaagaagcaacagtcgaatcaccacgggtgtttatcaaacgttttgtgtgggaggatagtgacccggcattga

SEQ ID NO: 30 - protein, 216 aa, Brassica napus
MASSASKFIKCVTVGDGAVGKTCMLICYTSNKFPTDYVPTVFDNFSANVVVEGTTVNLGLWDTAGQEDYNRLRPLSYRGADVFVLSFSLVSRASYENVFKKWIPELQHFAPGVPLVLVGTKLDLREDKHYLADHPGLSPVTTAQGEELRKLIGATYYIECSSKTQQNVKAVFDSAIKEVIKPVLKQKGKTKKKKKQQSNHHGCLSNVLCGRIVTRH

SEQ ID NO: 31 - DNA, 606 bp, Brassica napus
  CDS (1)..(606)
atgagcacagcgagattcatcaagtgtgtgacggtcggagatggagctgtggggaagacttgtatgctgatttcatataccagcaatacttttcctacggattacgttccgacagtttttgacaatttcagtgcgaatgtggtggtcgatggaagtactgtcaacctcggcctgtgggatactgctgggcaggaagattataacaggcttcggcctttgagttacagaggagcagatgtgtttttattggcattttccctaattagcaaggccagttacgagaacatttacaaaaagtggcttccggagctgaaacattatgcgcctagcatccccattgtactcgtcggaaccaagttagatttgagggatgacaaacagttcttgaaagatcatccaggagcagcttcaataacaactgcccagggagaggaattaagaaagatgattggagccatcaagtacttagaatgcagctccaaaacccagcagaatgtgaaggcagtgtttgatacagcgatccgggtagcgttgaggcctccaaaggcaaagaagaagataaagccattgaggaccaaaagatcaagaacatgctttttcttctaa

SEQ ID NO: 32 - protein, 201 aa, Brassica napus
MSTARFIKCVTVGDGAVGKTCMLISYTSNTFPTDYVPTVFDNFSANVVVDGSTVNLGLWDTAGQEDYNRLRPLSYRGADVFLLAFSLISKASYENIYKKWLPELKHYAPSIPIVLVGTKLDLRDDKQFLKDHPGAASITTAQGEELRKMIGAIKYLECSSKTQQNVKAVFDTAIRVALRPPKAKKKIKPLRTKRSRTCFFF

SEQ ID NO: 33 - DNA, 636 bp, Brassica napus
  CDS (1)..(636)
atgtcagcttcagtggctgctgcatcagtatcaacaacaacaacagcagctacaacgtttatcaagtgcgtcactgttggcgatggagctgtgggcaaaacttgtcttcttatctcctacaccagcaacacctttcctactgattatgttcctacagtgttcgacaacttcagtgcaaatgttctagtcgatggcaaaaccgtcaatcttggtctttgggatactgctggtcaagaagattacaataggcttagaccattgagttacagaggagcagatgttttcattcttgccttttctcttatcagcaggcctagctttgagaacattgctaaaaagtgggtccctgagctgcgacattatgcccctaacgtgcctattgttctagtgggaactaaattagatctaagagaggataagaagttcccaatgaactatccaggtgcttgcacaatctcaacagaacaaggtcaagagctaagaaaagagataggagcattagcatatatagagtgcagctcaaaaacacaacagaacgtgaaagcggtgtttgatgcagcgataaaagtagttctacagcctcctacaaaaattaagaaacaaaagagaagatttcgtttctgccatgctctctga

SEQ ID NO: 34 - protein, 211 aa, Brassica napus
MSASVAAASVSTTTTAATTFIKCVTVGDGAVGKTCLLISYTSNTFPTDYVPTVFDNFSANVLVDGKTVNLGLWDTAGQEDYNRLRPLSYRGADVFILAFSLISRPSFENIAKKWVPELRHYAPNVPIVLVGTKLDLREDKKFPMNYPGACTISTEQGQELRKEIGALAYIECSSKTQQNVKAVFDAAIKVVLQPPTKIKKQKRRFRFCHAL

SEQ ID NO: 35 - DNA, 588 bp, Brassica napus
  CDS (1)..(588)
atgagcgcttcgaggttcataaagtgtgtcaccgtcggcgatggtgccgtcggaaaaacctgtatgctgatctcttacacgagcaacaccttccctacggactatgtaccaactgttttcgataacttcagtgctaatgtggttgttgatgggaacactgtgaatcttggcttgtgggatacagctggtcaagaagactataacaggttaagaccattgagttaccgtggtgcggatgtcttcattcttgctttctctcttatcagcaaagctagctacgagaatatagctaagaagtggattcctgagctcaggcactatgcccctggtgttcctattatcctcgttggaacaaaactcgatcttcgagatgacaagcagttcttcatagaccaccctggtgcagtgccgattagtactaaccagggagaggaactaaagaaactgatagggtctccggcttacattgaatgcagttcaaagacgcagcagaacgtgaaggcagtctttgacgcagccataaaagtagtgcttcagccaccaaagcaaaagaagaagaaaaagaagaatggttgtgttttcttgtga

SEQ ID NO: 36 - protein, 195 aa, Brassica napus
MSASRFIKCVTVGDGAVGKTCMLISYTSNTFPTDYVPTVFDNFSANVVVDGNTVNLGLWDTAGQEDYNRLRPLSYRGADVFILAFSLISKASYENIAKKWIPELRHYAPGVPIILVGTKLDLRDDKQFFIDHPGAVPISTNQGEELKKLIGSPAYIECSSKTQQNVKAVFDAAIKVVLQPPKQKKKKKKNGCVFL

SEQ ID NO: 37 - DNA, 594 bp, Brassica napus
  CDS (1)..(594)
atgagcgcatcgaggttcataaagtgtgtgaccgttggtgacggagctgtgggtaaaacatgtctcctcatttcttacaccagcaacactttccctacggattatgttccgactgtttttgataacttcagcgctaatgtggttgttaacggagccactgtcaaccttggcttgtgggataccgctgggcaggaggattataacaggttaagaccattgagttaccgcggtgctgatgttttcatcttagccttctccctcatcagtaaggctagttatgagaatgtctccaagaagtggatccctgagctgactcactatgcccctggtgtcccaattgttcttgttggtaccaaactagatcttagggatgacaaacagttcttcgttgaccaccctggtgctgtacctattaccactgctcagggagaggaactgatgaagctaattggagctccttcgtacatcgagtgcagttcaaaatcacaggagaacgtgaagggggtgtttgatgcagcgattagagtggtacttcaacctccaaagcagaagaaaaagaagggcaaagtacaaaaggcctgctccattttgtaa

SEQ ID NO: 38 - protein, 197 aa, Brassica napus
MSASRFIKCVTVGDGAVGKTCLLISYTSNTFPTDYVPTVFDNFSANVVVNGATVNLGLWDTAGQEDYNRLRPLSYRGADVFILAFSLISKASYENVSKKWIPELTHYAPGVPIVLVGTKLDLRDDKQFFVDHPGAVPITTAQGEELMKLIGAPSYIECSSKSQENVKGVFDAAIRVVLQPPKQKKKKGKVQKACSIL

SEQ ID NO: 39 - DNA, 645 bp, Oryza sativa
  CDS (1)..(645)
atgagctcggcggcggcggcgacgaggttcatcaagtgcgtcaccgtgggggacggcgcggtggggaagacgtgcatgctcatctgctacacctgcaacaagttccccaccgattacatccccaccgtgttcgacaacttcagcgccaatgtctccgtggacgggagcgtcgtcaacctcggcctctgggacactgcaggtcaggaggattacagcaggttgaggcctctgagctacaggggagccgatgtgttcatcctgtccttctccctgataagcagggcgagctatgagaatgttcagaagaagtggatgccagagcttcgccggtttgcgcctggtgttcctgtagttcttgttggaaccaagttggatctccgtgaagatagggcctatcttgctgatcatccagcttcttccataataacaacggagcagggagaagaactgaggaagctaataggagcggtcgcctacatcgaatgcagctccaagacacagagaaacattaaagctgttttcgacactgccatcaaagtggtgcttcaacctccaagacataaggatgtaaccagaaagaaactccaatcaagctccaatcggccagtaaggcggtacttttgcggaagcgcttgtttcgcgtag

SEQ ID NO: 40 - protein, 214 aa, Oryza sativa
MSSAAAATRFIKCVTVGDGAVGKTCMLICYTCNKFPTDYIPTVFDNFSANVSVDGSVVNLGLWDTAGQEDYSRLRPLSYRGADVFILSFSLISRASYENVQKKWMPELRRFAPGVPVVLVGTKLDLREDRAYLADHPASSIITTEQGEELRKLIGAVAYIECSSKTQRNIKAVFDTAIKVVLQPPRHKDVTRKKLQSSSNRPVRRYFCGSACFA

SEQ ID NO: 41 - DNA, 645 bp, Oryza sativa
  CDS (1)..(645)
atgagcggcgccaccaagttcatcaagtgcgtcaccgtcggcgacggcgccgtcggcaagacctgcatgctcatctgctacatcagcaacaagttccccaccgattacatccccaccgtgttcgacaacttcagtgctaatgtttcagtggatgggaacatcgtcaacttgggattatgggacactgctggacaagaggattacagcaggctgaggccactgagctacaggggagcggatatatttgtgctggcattctcactgatcagcagagcaagctatgagaatgttctcaagaagtggatgccggagcttcgccggttcgcaccgaatgttccaattgttcttgttgggaccaagttagatctacgtgaccacagatcttaccttgcggaccatcctgctgcttccgcaattacgactgcacagggtgaagaacttagaaagcagataggcgccgcggcttacatcgaatgcagttcgaaaacacaacagaacatcaaggccgtgtttgatactgccatcaaggtggtccttcagcctcctcggagaaggggggagacgacgatggcaaggaagaagacaaggcgaagcaccggctgctcgttaaagaacttgatgtgtggcagtgcatgtgttgtttag

SEQ ID NO: 42 - protein, 214 aa, Oryza sativa
MSGATKFIKCVTVGDGAVGKTCMLICYISNKFPTDYIPTVFDNFSANVSVDGNIVNLGLWDTAGQEDYSRLRPLSYRGADIFVLAFSLISRASYENVLKKWMPELRRFAPNVPIVLVGTKLDLRDHRSYLADHPAASAITTAQGEELRKQIGAAAYIECSSKTQQNIKAVFDTAIKVVLQPPRRRGETTMARKKTRRSTGCSLKNLMCGSACVV

SEQ ID NO: 43 - DNA, 639 bp, Oryza sativa
  CDS (1)..(639)
atgggctcgaagccgccgccgccgccgcagcccagcgtctccttcaagctcgtcctcctcggcgacgggagagtaggcaaaacatctcttgtgctgcggtatgtgaatgatgtcttctcagacaaacaggaagcaactgttcaagcttcatatttgacaaagcgccttgttgttgaaggtgtgcctattacgctctctatctgggatacagctggacaagagaagttccatgcactaggccctatatactatcgtgatgcagacgctgctcttttagtatatgacatcacagacaatgatacttttcttcgtgtcacaaagtgggtgaaagagcttaagcaaatggcaaataaagatattgttatggccattgcagcaaataaaagtgacctggttagatcaaaacacatagacactaatgaagcagcaagctatgcagaaagtattggggcaactctctttgttacttctgccaaagctggtactgggattgatgatatcttcagtgacatagccaagagattattagagagaagaaaaaacagctccgatggcttgtcactggctcatccaaagaaaggcattttaatcgtcgacgatgaacctgagaaagaacctccaccaaagtgctgctcatag

SEQ ID NO: 44 - protein, 212 aa, Oryza sativa
MGSKPPPPPQPSVSFKLVLLGDGRVGKTSLVLRYVNDVFSDKQEATVQASYLTKRLVVEGVPITLSIWDTAGQEKFHALGPIYYRDADAALLVYDITDNDTFLRVTKWVKELKQMANKDIVMAIAANKSDLVRSKHIDTNEAASYAESIGATLFVTSAKAGTGIDDIFSDIAKRLLERRKNSSDGLSLAHPKKGILIVDDEPEKEPPPKCCS

SEQ ID NO: 45 - DNA, 806 bp, Brassica napus
  CDS (6)..(596)
ggaaaatgagcgcatctcggttcataaagtgcgtgacggtcggtgacggagcagtgggcaaaacatgtctcctcatctcttacaccagcaacactttccctacggattatgtgcccactgttttcgataactttagcgctaacgttgttgttaacggagccactgtcaacttaggactctgggatacagcagggcaggaggattataacagattgagacccttgagttaccgcggtgctgacgttttcatcttagccttctctcttatcagtaaggctagttatgagaatgtctccaagaagtggatccctgagctgacccactatgcccctggtgtccctattgttcttgttggaaccaaactagatcttagggatgacaaacagttcttcgttgaccaccctggtgctgtacctattaccactgctcagggcgaggaactaatgaagctaattggagctccttcgtacatcgagtgcagctcaaaatcacaggagaacgtgaagggggtgtttgatgcagcgatcagagtggtacttcaacctccaaagcagaagaaaaagaagagcaaagctcaaaaggcctgctccattttgtgatttctctacgctcatctctcttccactctctagtgaaggcttaagaagaagaaacactttagcctttaagatttggttcagagttcgttgtgataagcctcgcttaatccttagaaacgattacttctggttttactgataaagagcttccagctttatagctgagagctaatattgcactaccactataaaaaaaaaaaaaaaaaa

SEQ ID NO: 46 - protein, 197 aa, Brassica napus
MSASRFIKCVTVGDGAVGKTCLLISYTSNTFPTDYVPTVFDNFSANVVVNGATVNLGLWDTAGQEDYNRLRPLSYRGADVFILAFSLISKASYENVSKKWIPELTHYAPGVPIVLVGTKLDLRDDKQFFVDHPGAVPITTAQGEELMKLIGAPSYIECSSKSQENVKGVFDAAIRVVLQPPKQKKKKSKAQKACSIL

SEQ ID NO: 47 - protein, 32 aa, unknown
  MISC_FEATURE (15)..(15): Xaa is Leu, Ile or Met
  MISC_FEATURE (16)..(16): Xaa is Leu or Val
  MISC_FEATURE (17)..(17): Xaa is Ile, Leu or Tyr
  MISC_FEATURE (18)..(18): Xaa is Ser, Cys, Val or Arg
  MISC_FEATURE (20)..(20): Xaa is Thr, Ile or Val
  MISC_FEATURE (23)..(23): Xaa is Thr, Lys, Gln or Val
  MISC_FEATURE (1)..(32): consensus
KCVTVGDGAVGKTCXXXXYXSNXFPTDYVPTV

SEQ ID NO: 48 - protein, 32 aa, unknown
  MISC_FEATURE (1)..(32): Xaa is any natural amino acid
  MISC_FEATURE (1)..(32): consensus
KXVXXGDXXXGKXXXXXXXXXXXFXXXXXXTV

SEQ ID NO: 49 - protein, 16 aa, unknown
  MISC_FEATURE (1)..(16): consensus
LWDTAGQEDYNRLRPL

SEQ ID NO: 50 - protein, 16 aa, unknown
  MISC_FEATURE (1)..(1): Xaa is Leu or Ile
  MISC_FEATURE (9)..(9): Xaa is Asp, Lys or Glu
  MISC_FEATURE (10)..(10): Xaa is Tyr or Phe
  MISC_FEATURE (11)..(11): Xaa is Asn, Ser, Ala, His or Glu
  MISC_FEATURE (12)..(12): Xaa is Arg or Ala
  MISC_FEATURE (14)..(14): Xaa is Arg, Ala or Gly
  MISC_FEATURE (16)..(16): Xaa is Leu, Ile or Phe
  MISC_FEATURE (1)..(16): consensus
XWDTAGQEXXXXLXPX

SEQ ID NO: 51 - protein, 7 aa, unknown
  MISC_FEATURE (1)..(7): consensus
GTKLDLR

SEQ ID NO: 52 - protein, 7 aa, unknown
  MISC_FEATURE (1)..(1): Xaa is Gly or Ala
  MISC_FEATURE (2)..(2): Xaa is Thr, Asn or Leu
  MISC_FEATURE (4)..(4): Xaa is Leu, Ala, Ser or Lys
  MISC_FEATURE (7)..(7): Xaa is Arg, His or Val
  MISC_FEATURE (1)..(7): consensus
XXKXDLX

SEQ ID NO: 53 - DNA, 24 bp, unknown
  MISC_FEATURE (1)..(24): primer
atgtctgaaaaggccgttagaagg

SEQ ID NO: 54 - DNA, 26 bp, unknown
  MISC_FEATURE (1)..(26): primer
ttataaaattatgcaacagttagccc

SEQ ID NO: 55 - DNA, 579 bp, Saccharomyces cerevisiae; identical to SEQ ID NO: 1
  CDS (1)..(579)

SEQ ID NO: 56 - protein, 192 aa, Saccharomyces cerevisiae; identical to SEQ ID NO: 2

SEQ ID NO: 57 - DNA, 803 bp, Nicotiana tabacum
  CDS (49)..(642)
aaaaaaaaaaaaaaaaaaaaaaaaaaaaaaaaaagaaaaaagaaaaaaatgagtgcttcaaggtttatcaagtgtgttacggttggtgatggtgctgttgggaaaacttgtcttttgatttcatacaccagcaatactttccctacggattatgtgcccactgtgtttgacaatttcagtgcaaatgttgttgtcaatgggagcactgtcaacctagggttgtgggatactgctggacaggaggattacaataggttaagacctctgagttaccgtggagccgatgttttcattttggcattctctctcattagtaaagccagctatgagaatgtttccaagaagtggattcctgagttgaagcactatgctcctggtgtcccaatagttcttgttggaacaaagcttgatcttcgggatgataagcaattcttcatagaccatcccggtgctgtgccaattactactgctcagggcgaggagctaaggaaaactattggtgcacctgcttacattgaatgtagttcaaaaacacaacagaatgtgaaagcagtctttgatgctgccattaaggtcgtcctccagccgcctaagacgaagaaaaagaaggggaaatctcaaaaatcctgctcgatattgtgatcaaactgtaggtccaacgatagtgctggtcacaattctcgttgtaatccctcactcactcgtatccctttatcttccttcgtctcagaggaagtacgaggtcatcgtttgtcttatatttgaaactactaaccatctcttggaaatatcaggtggcttgg

SEQ ID NO: 58 - protein, 197 aa, Nicotiana tabacum
MSASRFIKCVTVGDGAVGKTCLLISYTSNTFPTDYVPTVFDNFSANVVVNGSTVNLGLWDTAGQEDYNRLRPLSYRGADVFILAFSLISKASYENVSKKWIPELKHYAPGVPIVLVGTKLDLRDDKQFFIDHPGAVPITTAQGEELRKTIGAPAYIECSSKTQQNVKAVFDAAIKVVLQPPKTKKKKGKSQKSCSIL

SEQ ID NO: 59 - DNA, 993 bp, Nicotiana tabacum
  CDS (29)..(625)
ggcacgagggagatttgggttttgtagaatgagtgcgtctaggttcataaagtgtgtcaccgttggcgacggagctgtgggtaaaacttgtcttctcatttcctataccagcaacacatttcccactgattacgtcccaactgtattcgacaattttagtgcaaatgtggttgtcgatgggagcactgtcaatctggggctgtgggatactgcaggtcaggaggattacaatagattaagaccgttgagctaccggggggcagatgtatttatactggcattttctctcattagcaaagcgagctatgaaaatgtctccaaaaagtggattcctgaattgaggcattatgctcctggagttccaattattcttgttggaacaaagctagatctccgagaggataagcaattcttcctggaccatccaggtgctgttccacttaccacagctcagggtgaagagctgagaaagtcgattggtgcttccgcttacattgaatgtagtgcaaaaacacaacagaatgtgaaggctgtttttgatgctgccattaaggtggttctacaaccacccaaacaaaagaagaaaaagaagagaaagggtcaaaaagcctgctctatcttgtgattgctgaaataatagacaagtgatggagatgtagattgttatcaatgtcttccaagttcaaagaatgcagtgtaaggttcaacgttggtagtcctgactgactatgataggaaagcatgaatctgccttgtccgtaacattggaggccaagatgtatatttgtgatccgcatatggttggggatacagatgtgcaaaattctctgtttcgcgttgattctgtgtaatatattatgtaacacttgtgtgatgattccttgaatttgcatctactatgtgttgttaaaatgtaaccgaacatactgatttagattgtccaagaagttgaatttgctatgtcataaaaaaaaaaaaaaaaaaaaaaaaaaa

SEQ ID NO: 60 - protein, 198 aa, Nicotiana tabacum
MSASRFIKCVTVGDGAVGKTCLLISYTSNTFPTDYVPTVFDNFSANVVVDGSTVNLGLWDTAGQEDYNRLRPLSYRGADVFILAFSLISKASYENVSKKWIPELRHYAPGVPIILVGTKLDLREDKQFFLDHPGAVPLTTAQGEELRKSIGASAYIECSAKTQQNVKAVFDAAIKVVLQPPKQKKKKKRKGQKACSIL

SEQ ID NO: 61 - DNA, 640 bp, Gossypium hirsutum
  CDS (17)..(613)
cacgcgtggcgtaagtatgagtgcttccaggttcataaaatgcgtcacggtcggtgacggtgccgtcggcaagacttgtctgctcatttcctacactagcaatactttccctaccgattatgtgccaactgtctttgacaactttagtgctaatgtggttgtggatgggaacactgttaatctgggattgtgggatactgctggacaggaagattacaatagattaagaccattgagctatcgtggagcagatgtcttcttgctggcattttctctcattagcaaagctagctatgaaaatgttgctaagaaatggattccagaattgagacattatgcacccggtgttccaattattcttgttgggactaagcttgatcttcgagaagataagcagttcttcatagatcaccctggtgcggtgcccattaccacagcacagggtgaggaattgagaaagctaattggagcgcatttttacattgagtgtagttcaaaaacacaacagaatgtgaaagcggtctttgatgcggccatcaaagtagttctccagcctccaaagaagaagaagaaaaagaagagaaaggcacaaaaagcttgctcaatattgtgatcatgcaaagaagtgatattggtgcag

SEQ ID NO: 62 - protein, 198 aa, Gossypium hirsutum
MSASRFIKCVTVGDGAVGKTCLLISYTSNTFPTDYVPTVFDNFSANVVVDGNTVNLGLWDTAGQEDYNRLRPLSYRGADVFLLAFSLISKASYENVAKKWIPELRHYAPGVPIILVGTKLDLREDKQFFIDHPGAVPITTAQGEELRKLIGAHFYIECSSKTQQNVKAVFDAAIKVVLQPPKKKKKKKRKAQKACSIL

SEQ ID NO: 63 - DNA, 1025 bp, Nicotiana tabacum
  CDS (103)..(696)
ttcttgtatccgcccagctcccccatacccatttcaatctttttttttgtttataatttttttctgggaatcaggtcttctcaagaagatctgagaagaaaaatgagtgcttcgaggtttataaaatgtgtgacggtgggtgatggtgccgttggaaaaacgtgtctcttgatttcttacaccagcaacacctttcctacggattatgtgcctactgtgttcgataatttcagtgcaaatgtggtcgtcaatgggagtactgtcaacctagggttgtgggatacagctggacaggaggattacaataggttaagacctctgagttaccgtggagctgatgttttcatcttggcattctctctcattagtaaagccagctatgaaaatgtttccaagaagtggattcctgagttgaagcattatgctcccggtgttccaatagtgcttgttggaacaaaacttgatcttcgggatgataagcagttcttcatagaccatcctggtgctgtgccaattactactgctcagggcgaggagctgaggaaaacgattggggcccctgcttacattgaatgtagttcaaaaacacaacagaatgtgaaagcagtctttgatgctgctattaaggtcgtgctccagccacccaagcagaaaaaaaagaaggggaaggcccaaaaggcatgttcgattttgtgatcaacagtaggtccaacaatattactggtcacagttctccttgtaatctctccctcatattcctttgtttttcctttgtctcggagaaagtaggaggtccatgtatgtctctttaaaattacttgtgatctcttgaattgcaggtggctcggtttttatactgctgtcatctctagttgttgagtcacagcaccttgttgtaggccactgattgggccctctctggtttcatttgctttatgattaatgactgaaagatccagttggaaaaaaaaaaaaaaaaaaaaaaaaaactcggggggggccgggcccaatcccctataggggtg

SEQ ID NO: 64 - protein, 197 aa, Nicotiana tabacum
MSASRFIKCVTVGDGAVGKTCLLISYTSNTFPTDYVPTVFDNFSANVVVNGSTVNLGLWDTAGQEDYNRLRPLSYRGADVFILAFSLISKASYENVSKKWIPELKHYAPGVPIVLVGTKLDLRDDKQFFIDHPGAVPITTAQGEELRKTIGAPAYIECSSKTQQNVKAVFDAAIKVVLQPPKQKKKKGKAQKACSIL

SEQ ID NO: 65 - DNA, 1178 bp, Medicago truncatula
  CDS (136)..(729)
cctatttcatcttcatcaccgattattcttgaacagttaccaatttcaaactcaaacacacaacaacattgacacatgaataattagggtttatacctcaaagaaacacaacaaacttgaataattaggttcgaaatgagtggttccaggttcatcaagtgtgtcacagttggtgatggtgccgttggaaagacttgtttgcttatctcctacaccagcaacactttccctacggactatgtgccgactgtctttgacaatttcagtgcaaatgtagttgtggatgggagcactataaatctcgggttgtgggatactgctggccaagaagattacaatagattaagacccttaagctatcgtggagcagatgttttcctgcttgctttttctctcataagcaaggctagctatgaaaatattgccaaaaaatggattcctgagttgaggcattatgctcctggtgttccaattattctcgttggaacaaaacttgatcttcgggatgatagccagttctttcaagaccatcctggtgcggcgccaatcaccacagcacagggtgaggaactgagaaaacttatcggtgctccagtttacattgaatgtagttccaaaacacagaagaatgtgaaggctgtttttgattcggccatcaaagtagttctacagccaccaaagcaaaagaaaacaaagagaaaggggcaaaaagcctgttccattttgtgatcttcagttctttcgtattgtagtttgtggaggatgacatgacagtagccattttcctgggtaatcctttgccattctgattctatatatatccttatactattttcgacctagatggaggaaccgccatgtccaactgaccgcgttaaagcttgcttataaaaaatcaagctatttgtctctggctgaaggataatatgtgaagtcataattccatcatgtttggtgtgtacaattgttgtgtttctccggaatgtttaccttttgtattgattatcaaatggtcatctccatttgtggacatgggttttactcacattgtagtctaatcttaggaagtgcttgcaacatatgtgctttggatgtgaactaagtatatgtaattaattatgttagctacttaacatccttaatatagctcggtttgttcaaaaaaaaaaaaaaaaaaa

SEQ ID NO: 66 - protein, 197 aa, Medicago truncatula
MSGSRFIKCVTVGDGAVGKTCLLISYTSNTFPTDYVPTVFDNFSANVVVDGSTINLGLWDTAGQEDYNRLRPLSYRGADVFLLAFSLISKASYENIAKKWIPELRHYAPGVPIILVGTKLDLRDDSQFFQDHPGAAPITTAQGEELRKLIGAPVYIECSSKTQKNVKAVFDSAIKVVLQPPKQKKTKRKGQKACSIL

SEQ ID NO: 67 - DNA, 1139 bp, Medicago truncatula
  CDS (174)..(767)
acgaacgaacgcttcaacggcaaaatttcccgggttccttgtctctctttcatgcgcgagaattctcattttctcacgctcctaatggatgcgtaattgaagcgaataattggaggagtgtgtgagtgatttggagtaataaggtgaaagatctggatagggtttgaaagaagatgagcgcttctaggttcatcaagtgtgttactgttggggatggagctgttggtaaaacttgtttgttaatttcatacaccagcaataccttccccactgactatgtgccaactgtcttcgacaatttcagtgcaaatgtggttgtgaatggaagcactgtgaatctgggtttgtgggacactgcaggacaagaggattataacagattaagacctttgagttatcgtggtgccgatgttttcattctcgctttctccctcataagcaaggccagttatgaaaatgtttccaaaaagtggattccagagttgaagcattatgcacctggtgttcccattattctggttggcacaaagcttgaccttcgggatgacaagcagttcttcgtcgaccatcctggtgctgttcctattaccactgctcagggagaagagcttaggaagctgatcaatgcacctgcttatatcgaatgcagttcgaaatcacagcagaatgtgaaagcagtctttgatgcagccataagagttgtccttcaaccaccaaagcaaaagaaaaagaagagtaaagcaccaaaggcttgttcgatattgtgatttgctaggtcggtctaaagaaatttgacaaccattctccaacatgtatttctctcctcttcttcctattcttcattcctattatgctgaagaagttggagtctatgtgggtgttctttcgtctaacagactctagatctcgttgaagcataaggtggttggtgctttgctttcttggaattattgtgacttctaattgtcaaatttgtatttcatggttcccacctttttcttaacataagttttatgtattaatagactggaatatcccagttaggattactaccttgtttgcttgaagatatatataatatctacattattttgcatttagttataatgcttgctctattcaaaaaaaaaaaaaaaaaa

SEQ ID NO: 68 - protein, 197 aa, Medicago truncatula
MSASRFIKCVTVGDGAVGKTCLLISYTSNTFPTDYVPTVFDNFSANVVVNGSTVNLGLWDTAGQEDYNRLRPLSYRGADVFILAFSLISKASYENVSKKWIPELKHYAPGVPIILVGTKLDLRDDKQFFVDHPGAVPITTAQGEELRKLINAPAYIECSSKSQQNVKAVFDAAIRVVLQPPKQKKKKSKAPKACSIL

SEQ ID NO: 69 - DNA, 985 bp, Medicago truncatula
  CDS (143)..(736)
gttcaacgctaaaatcacactctcatcttccaaatagatgtgtgatagtaattgaaagagaagaagaagaagaaagtactggaggagggggactgtcctcaggtgaagatctgaggctattttgggtatttcatttttcaagatgagtgcttctaggtttattaaatgtgttactgttggtgatggagctgttggcaaaacttgtttgttgatttcttacaccagcaatactttccccacggattatgtgccgacagtttttgacaatttcagtgcgaatgtggttgttaatggaagtattgtgaatctgggtttgtgggatactgctggacaagaggattataacagattaagacctttgagttaccgtggtgccgatgttttcatattggctttctctctcataagcaaagccagttatgaaaatgtctccaaaaagtggattccagagttgaagcattatgcacctggtgtccccataattctggttggaacaaagcttgatcttcgggatgataagcagttctgcatagaccatcctggtgccgttcccattaccacagctcagggagaagagctgaggaagctgattaatgcaccagcttacattgaatgcagttcaaaatcacaggagaacgtgaaggcggtgtttgatgcagccataagagttgtccttcaaccaccaaagcagaagaaaaagaagaataaagcacaaaaggcctgttcaatattgtaattcactaggtgtaaacatttgattgtcctttgttctacctgtattcccctccccttcttttcatcattttctttgttattgaagaagttggagagtctttgtgggtgttctttcagacaaatactctagatctccttgaagcataaggtggcttaatgtttttgctttctatgaattattattgtcaactctaatagttaaatttgcatttcatgcttcccatctttttaaaaaaaaaaaaaaaaaaaa

SEQ ID NO: 70 - protein, 197 aa, Medicago truncatula
MSASRFIKCVTVGDGAVGKTCLLISYTSNTFPTDYVPTVFDNFSANVVVNGSIVNLGLWDTAGQEDYNRLRPLSYRGADVFILAFSLISKASYENVSKKWIPELKHYAPGVPIILVGTKLDLRDDKQFCIDHPGAVPITTAQGEELRKLINAPAYIECSSKSQENVKAVFDAAIRVVLQPPKQKKKKNKAQKACSIL

SEQ ID NO: 71 - DNA, 779 bp, Brassica napus
  CDS (183)..(776)
ggctcatagggtttctagttttcgggagaaagttctttcatttttcaagaatgcccagatgctcgattgaggttgagcatccagacaacgaagaagaaaattaacaaaatctttgagcttttctttttatttttggtttttcccccctgaaagtattaacaaataatcttcgagtagagaaaatgagcgcatctcggttcataaagtgtgtaacggttggtgatggagctgtcggaaaaacatgtttgttgatttcttacacaagcaacactttccctacggactatgtgcccaccgttttcgataatttcagtgctaatgtggtggttaacggagccaccgttaatcttggattgtgggatactgcagggcaagaggattacaacagattaagaccactaagctaccgtggagctgatgttttcatattggccttctctcttatcagtaaagccagttatgaaaacgtctccaaaaagtggatcccggagttgaagcattacgcgcctggtgtccccgtcatccttgttggatcaaagcttgatcttcgagatgataagcaattcttcgtcgaccatcctggcgctgtcccgattacaactgctcagggagaggagctgaggaagctaatagatgcacctacttacatcgaatgcagttccaaatctcaagagaatgtgaaagctgtctttgacgcagccatacgagtggtgttgcaaccgcctaagcagaagaagaaaaagagcaaagcgcagaaggcatgctccatccagtgatat

SEQ ID NO: 72 - protein, 197 aa, Brassica napus
MSASRFIKCVTVGDGAVGKTCLLISYTSNTFPTDYVPTVFDNFSANVVVNGATVNLGLWDTAGQEDYNRLRPLSYRGADVFILAFSLISKASYENVSKKWIPELKHYAPGVPVILVGSKLDLRDDKQFFVDHPGAVPITTAQGEELRKLIDAPTYIECSSKSQENVKAVFDAAIRVVLQPPKQKKKKSKAQKACSIQ

SEQ ID NO: 73 - DNA, 757 bp, Brassica napus
  CDS (164)..(757)
cgatacaccgattcatttcattcttcattgatcgcttcctctcacatacccgatttcgtttagggttaacattttctagggttttagagataggcgaaactgaaattgagaagaagacgggtgttgtttcctcatagatctgaggggttgaatttttcgatttatgagcgcatctcggttcataaagtgcgtgacggttggggacggagcagtgggcaaaacatgtctcctcatctcttacaccagcaacactttccctacggattatgttccaactgttttcgataacttcagcgctaatgttgttgttaacggagccactgtcaacttaggactctgggataccgcagggcaggaggattataacagattgagacccttgagttaccgcggtgctgacgttttcatcttggccttctctctcatcagtaaggctagttatgagaatgtctccaagaagtggatccctgagctgacccactatgcccctggtgtccctatcgttcttgttggtaccaaactagatcttagggatgacaaacagttcttcgttgaccaccctggtgctgtacctattaccacttctcagggagaggaactaatgaagctaattggagctccttcgtacatcgagtgcagttcaaaatctcaagagaacgtgaaaggggtgtttgatgcagcgatcagagtggtacttcaacctccaaagcagaagaaaaagaagagcaaggcacaaaaggcctgctccattttgtaa

SEQ ID NO: 74 - protein, 197 aa, Brassica napus
MSASRFIKCVTVGDGAVGKTCLLISYTSNTFPTDYVPTVFDNFSANVVVNGATVNLGLWDTAGQEDYNRLRPLSYRGADVFILAFSLISKASYENVSKKWIPELTHYAPGVPIVLVGTKLDLRDDKQFFVDHPGAVPITTSQGEELMKLIGAPSYIECSSKSQENVKGVFDAAIRVVLQPPKQKKKKSKAQKACSIL

SEQ ID NO: 75 - DNA, 645 bp, Oryza sativa; identical to SEQ ID NO: 39
  CDS (1)..(645)

SEQ ID NO: 76 - protein, 214 aa, Oryza sativa; identical to SEQ ID NO: 40

SEQ ID NO: 77 - DNA, 1135 bp, Homo sapiens (man)
  CDS (105)..(680)
ggcagccgaggagaccccgcgcagtgctgccaacgccccggtggagaagctgaggtcatcatcagatttgaaatatttaaagtggatacaaaactatttcagcaatgcagacaattaagtgtgttgttgtgggcgatggtgctgttggtaaaacatgtctcctgatatcctacacaacaaacaaatttccatcggaatatgtaccgactgtttttgacaactatgcagtcacagttatgattggtggagaaccatatactcttggactttttgatactgcagggcaagaggattatgacagattacgaccgctgagttatccacaaacagatgtatttctagtctgtttttcagtggtctctccatcttcatttgaaaacgtgaaagaaaagtgggtgcctgagataactcaccactgtccaaagactcctttcttgcttgttgggactcaaattgatctcagagatgacccctctactattgagaaacttgccaagaacaaacagaagcctatcactccagagactgctgaaaagctggcccgtgacctgaaggctgtcaagtatgtggagtgttctgcacttacacagagaggtctgaagaatgtgtttgatgaggctatcctagctgccctcgagcctccggaaactcaacccaaaaggaagtgctgtatattctaaactgttttctccttcccttctttgctgctgcttcctgtcccactactgtagaaagatcgtttaaaaacaaaggaataaaaccatcctgtttgaaagcctctgcgtctttttactcaccaccttagagcaacctctgtattagtttttgatcaagaattgcaatatcatataaattttttgtgatcagtagtcaagttggacttgttttaacgttctgctgcttgagttgcctgatgctcagagctttttggtttggattactattgcaaagggaacttggtctggcttagatgtcctcttggagaaaataacaagagttttaacacttctagatcttagttcagatggagaaagtaacacaaacatcattttactcttatgatcaattgttaattgtaattgcatgacaaaccttatggaaaaggggtgacctagtagagtgtaatggggaaggg

SEQ ID NO: 78 - protein, 191 aa, Homo sapiens (man)
MQTIKCVVVGDGAVGKTCLLISYTTNKFPSEYVPTVFDNYAVTVMIGGEPYTLGLFDTAGQEDYDRLRPLSYPQTDVFLVCFSVVSPSSFENVKEKWVPEITHHCPKTPFLLVGTQIDLRDDPSTIEKLAKNKQKPITPETAEKLARDLKAVKYVECSALTQRGLKNVFDEAILAALEPPETQPKRKCCIF

SEQ ID NO: 79 - DNA, 576 bp, Caenorhabditis elegans
  CDS (1)..(576)
atgcaagcgatcaaatgtgtcgtcgttggtgacggagccgtcggtaaaacgtgtctcctgatatcctacaccacaaacgcatttcccggagaatatattccgacggtattcgacaactactcagcaaatgtgatggtcgacggtcggccgataaatctcgggctctgggatacagctggacaggaagattacgatcgactccgaccactgtcatatccacaaacagacgtgtttctcgtatgctttgccctgaacaatccggcgagttttgagaatgttcgtgcgaaatggtatccagaagtgtcacatcattgcccgaatacgccgattattttggttggaacgaaagctgatctgcgtgaggatcgagatactgttgaacggctccgcgaacgccggctccaaccagtgagccaaacccagggctacgtgatggcaaaggaaatcaaggctgtcaagtatctggagtgctcggcgctcacgcaacgtggtctgaaacaagttttcgatgaggcgatccgagccgtcgtcacgccgccacaaagagccaaaaagagcaagtgtacggtgctctaa

SEQ ID NO: 80 - protein, 191 aa, Caenorhabditis elegans
MQAIKCVVVGDGAVGKTCLLISYTTNAFPGEYIPTVFDNYSANVMVDGRPINLGLWDTAGQEDYDRLRPLSYPQTDVFLVCFALNNPASFENVRAKWYPEVSHHCPNTPIILVGTKADLREDRDTVERLRERRLQPVSQTQGYVMAKEIKAVKYLECSALTQRGLKQVFDEAIRAVVTPPQRAKKSKCTVL

SEQ ID NO: 81 - DNA, 579 bp, Caenorhabditis elegans
  CDS (1)..(579)
atggctgcgattagaaagaagttggtgatcgtcggcgacggagcctgcggtaaaacttgcctgctcatcgttttctcaaaggatcagttcccagacgtgtatgtgccgactgttttcgagaattatgttgccgacattgaagttgacggaaagcaggtcgaacttgctctatgggatacagctggacaagaggactatgatcgtctgcgtccactctcttatccggatactgacgtcattctgatgtgcttctcaattgattcacccgattcactggagaatattccagaaaaatggacaccagaagtcaggcatttctgtccaaatgttccgattattttggtcggaaataaacgagatcttcgtagtgatccacagactgttcgagaattggcaaaaatgaaacaggagcccgtgaagcctgagcagggacgagcaattgctgagcaaattggagcatttgcatatttggagtgctctgcgaagactaaggacggaattcgtgaggtattcgagaaggcgacacaggcggcattgcaacagaagaagaaaaagaagagcaagtgcatgattttgtaa

SEQ ID NO: 82 - protein, 192 aa, Caenorhabditis elegans
MAAIRKKLVIVGDGACGKTCLLIVFSKDQFPDVYVPTVFENYVADIEVDGKQVELALWDTAGQEDYDRLRPLSYPDTDVILMCFSIDSPDSLENIPEKWTPEVRHFCPNVPIILVGNKRDLRSDPQTVRELAKMKQEPVKPEQGRAIAEQIGAFAYLECSAKTKDGIREVFEKATQAALQQKKKKKSKCMIL

SEQ ID NO: 83 - DNA, 928 bp, Schizosaccharomyces pombe
  CDS (55)..(633)
gaattcaataaagtgaagcaaagctttacgattaattattttttgtgaaatagtatgcccaccattaagtgtgtcgtagtaggagacggtgctgtaggaaagacctgtctgcttatttcctatactacaaacaagtttcctagtgactatgtgccaactgtattcgataattatgctgtcactgtcatgatcggtgatgaaccatacactcttggtttattcgataccgctggtcaggaggattatgatcgcttgcgtcctttatcctatcctcaaacagacgtctttttggtttgttttagtgtaacttctcctgccagttttgaaaatgtgaaagaaaagtggtttcccgaagttcatcatcattgtccgggcgtcccgtgcttaattgttggtacccaaattgatttacgtgatgacccttctgtgcaacagaaactagctcgccagcatcagcatccccttacacatgagcaaggtgaacgattagctcgtgagttgggtgctgtcaagtatgttgagtgttccgctttgacccaaaaagggttaaagaatgtttttgatgaagctattgtagccgctcttgatcctcctgttcctcacaagaaaaagtcaaagtgtttggtactgtaatttaaccctggttttctttccttttccgaaatttccttaatacagctagtttacaacagtaaacaatgtcttagctttctttaacgatccctcatatttgcaaagatatttgctatttgttattttcatcctagcttttgtgcttcttcattcattctgtcaatcacacacttcttgggctttacatatctgtgttttctggctaggcatatttcctttttccgttaaataaacgacgattttgctatacttttgctacattattgtattcttctgccattactcgcaggaattc

SEQ ID NO: 84 - protein, 192 aa, Schizosaccharomyces pombe
MPTIKCVVVGDGAVGKTCLLISYTTNKFPSDYVPTVFDNYAVTVMIGDEPYTLGLFDTAGQEDYDRLRPLSYPQTDVFLVCFSVTSPASFENVKEKWFPEVHHHCPGVPCLIVGTQIDLRDDPSVQQKLARQHQHPLTHEQGERLARELGAVKYVECSALTQKGLKNVFDEAIVAALDPPVPHKKKSKCLVL

SEQ ID NO: 85 - DNA, 579 bp, Mus musculus (house mouse)
  CDS (1)..(579)
atgcaggccatcaagtgtgtggtggtgggtgatggagccgtgggcaagacgtgtcttctcatcagctacaccaccaacgccttccctggagaatacatccccactgtatttgacaactactcagccaatgtgatggtggacagtaagccggtgaacctggggctgtgggataccgcaggtcaggaggactatgaccgcctccggccactctcctacccacagacagatgtatttctcatctgcttctcgctagtcagcccagcctcctatgagaatgtccgtgccaagtggttccctgaggtacggcaccactgccccagcacccccatcatcctggtgggtaccaagctggaccttcgcgatgacaaggacaccatcgagaagctgaaggagaagaagctggctcccatcacctacccgcagggcctggcactggccaaggatattgattcagtcaagtacttggaatgttctgcactcacccagcgaggcctgaagaccgtcttcgatgaggcaatccgcgcagtcctctgcccacagcccacacgacagcagaagcgcccctgcagcctgctctag

SEQ ID NO: 86 - protein, 192 aa, Mus musculus (house mouse)
MQAIKCVVVGDGAVGKTCLLISYTTNAFPGEYIPTVFDNYSANVMVDSKPVNLGLWDTAGQEDYDRLRPLSYPQTDVFLICFSLVSPASYENVRAKWFPEVRHHCPSTPIILVGTKLDLRDDKDTIEKLKEKKLAPITYPQGLALAKDIDSVKYLECSALTQRGLKTVFDEAIRAVLCPQPTRQQKRPCSLL

SEQ ID NO: 87 - DNA, 840 bp, Discopyge ommata
  CDS (97)..(675)
gaccggcgcgccattggacggtcgctaggcggaggcggaagggattggttgccgtgcgacgtcagtcaggtgcttcaggagcgacggggcacagcgatggcagcgatccggaagaagctcgtcatcgttggcgatggagcttgtggcaagacctgcctcctgatcgtcttcagcaaggaccagttcccggaggtctacgtccccactgtcttcgagaactacgtggcagacatcgaggtggacgggaagcaggtggagctcgctctctgggacacggctggacaggaggactatgaccgcctgcgacccctctcctaccctgacaccgacgtcattctgatgtgcttttctatcgacagccccgacagcttggagaacattccggagaagtggaccccggaggtgaagcacttctgccccaacatccccatcatcctggtgggcaacaagaagactgcgggggacgagcacacacggagggagctagccaagatgaagcaggagcctgtcaaaccagatgatgccaaggagatggggagccgcatcaaagcctttggctacctggaatgctcagcgaagacgaaggaaggcgtgcgcgaggtctttgagctggcctcgcgcgctgctctgcaggccaagaaaaccaagagcaagagcccctgtctgcttctgtgagcaggagctcccagctatccccacttctctctgcttctgctcactctccgtcctccccctctcccattccttctctttcctccctcgttcttccctctcttgtttctccccatctctctcctccctctcgttctttcctctcctcttgttttcctccttgagcgc

SEQ ID NO: 88 - protein, 192 aa, Discopyge ommata
MAAIRKKLVIVGDGACGKTCLLIVFSKDQFPEVYVPTVFENYVADIEVDGKQVELALWDTAGQEDYDRLRPLSYPDTDVILMCFSIDSPDSLENIPEKWTPEVKHFCPNIPIILVGNKKTAGDEHTRRELAKMKQEPVKPDDAKEMGSRIKAFGYLECSAKTKEGVREVFELASRAALQAKKTKSKSPCLLL

SEQ ID NO: 89 - DNA, 697 bp, Canis lupus familiaris (dog)
  CDS (1)..(582)
atggctgccatccggaagaaactggtgattgttggtgatggagcctgtggtaagacttgtttgctcatcgtctttagcaaggaccagttcccagaggtgtatgtacccacagtgtttgagaactatgtggcagatattgaagttgatggaaagcaggtagagttggctttgtgggatacagctgggcaggaagattatgatcgcttgaggcctctctcctatccagacactgatgttatactgatgtgtttctctattgacagccctgatagcttagaaaacatcccagaaaaatggaccccagaagtcaagcacttctgtcccaacgtgcccatcatcctggttgggaacaagaaggatcttcggaatgatgagcacacaaggcgggagctagccaagatgaagcaggagccggtgaaaccgacagaaggcagagatatggcaaacaggattggtgcttttgggtacatggagtgttcagcaaagaccaaagatggagtgagggaggtttttgaaatggccacgagagctgctctgcaagccagacgtgggaagaaaaaatctgggtgccttgtcttgtgaaaccctgctgcaagcacagccctcatgcggttaattttgaagtgctgtttattaatcttagtgtatgattactggcctttttcatttatctataatttacctaagattacaaatc

SEQ ID NO: 90 - protein, 193 aa, Canis lupus familiaris (dog)
MAAIRKKLVIVGDGACGKTCLLIVFSKDQFPEVYVPTVFENYVADIEVDGKQVELALWDTAGQEDYDRLRPLSYPDTDVILMCFSIDSPDSLENIPEKWTPEVKHFCPNVPIILVGNKKDLRNDEHTRRELAKMKQEPVKPTEGRDMANRIGAFGYMECSAKTKDGVREVFEMATRAALQARRGKKKSGCLVL

SEQ ID NO: 91 - DNA, 705 bp, Drosophila melanogaster
  CDS (25)..(603)
tagcactcagtcagaaatcgaaccatgcaggcgatcaagtgcgtcgtcgtgggcgacggagccgtgggaaagacctgcctgctgatcagctacacgaccaatgcctttcccggcgagtacatacccaccgtgttcgacaactactcggccaacgtgatggtggacgccaagcccatcaacctgggcctgtgggatacggccgggcaggaggactacgaccgactgaggccactgtcttatccccagaccgatgtcttcctcatctgcttctcgctggtgaatccggcatcgttcgagaacgtgcgggccaagtggtatccggaggtgcgccaccactgccccagcacgcccatcatcctggtgggcaccaagctggatttgcgcgacgacaagaacacaatcgaaaagctgagggacaagaaactggtgcccatcacctatccgcagggcctggccatggccaaggaaatcggagcggtcaagtatctggagtgctcggccctgacgcagaagggtctgaaaaccgttttcgacgaggccatccggtcggttttgtgccccgtgctgcagcccaagtccaagcgcaagtgcgccctgctctaaaagagttagacagttggtcggtggtgttccaccgcagcgactcctgcttaaacgctacactactctactctaacctataataaccattatgtaacctaagcc

SEQ ID NO: 92 - protein, 192 aa, Drosophila melanogaster
MQAIKCVVVGDGAVGKTCLLISYTTNAFPGEYIPTVFDNYSANVMVDAKPINLGLWDTAGQEDYDRLRPLSYPQTDVFLICFSLVNPASFENVRAKWYPEVRHHCPSTPIILVGTKLDLRDDKNTIEKLRDKKLVPITYPQGLAMAKEIGAVKYLECSALTQKGLKTVFDEAIRSVLCPVLQPKSKRKCALL

SEQ ID NO: 93 - DNA, 801 bp, Drosophila melanogaster
  CDS (160)..(735)
ctcgcacgcaaagagctcgctggagagagagaacgctaacacaaaaggaaatagtagttttccgtacgtatcgagcccagcccagaaaagcggaaaactaaacggattcgacagcggttgcaaattttaaataactgagtcatcacccctctgcacaacatgcaaaccatcaagtgcgtggtcgtcggcgacggagccgtgggtaagacatgcctgctcatctcgtatacaaccaacaagttcccgtcggagtacgtgcccacggtgttcgacaactatgcggtcactgtgatgatcggcggtgagccctacacactgggcctgttcgatacggccggacaggaggattacgatcggctgcgtccgctctcctatccgcagacggatgtcttccttgtctgcttttcggtggtcagtcccagttccttcgagaacgtcaaggagaagtgggtgcccgagattacacaccattgccaaaagacgccgttcctgctggtgggcacacagattgatttgcgcgacgagaacagcacgctggagaagctggccaagaacaagcagaagcccatcaccatggagcagggcgagaagctggccaaggagctgaaggccgtcaagtacgtggagtgctcggccttgacacagaagggcctgaaaaatgtattcgacgaggccatcctggccgccctcgagccaccagagcccacaaagaaaaggaagtgcaaattcttataattctgctttcctcacacgcggtatccctttcattctggctttctactatcgcaatgactccttccc

SEQ ID NO: 94 - protein, 191 aa, Drosophila melanogaster
MQTIKCVVVGDGAVGKTCLLISYTTNKFPSEYVPTVFDNYAVTVMIGGEPYTLGLFDTAGQEDYDRLRPLSYPQTDVFLVCFSVVSPSSFENVKEKWVPEITHHCQKTPFLLVGTQIDLRDENSTLEKLAKNKQKPITMEQGEKLAKELKAVKYVECSALTQKGLKNVFDEAILAALEPPEPTKKRKCKFL

SEQ ID NO: 95 - DNA, 609 bp, Schizosaccharomyces pombe
  CDS (1)..(609)
atggcgacagaacttcgcagaaagctcgttattgtgggagatggtgcatgtggtaaaacatgcttattaattgtattttctaaaggaacctttcccgaggtctatgttcccactgtttttgaaaattatgtagctgatgttgaggttgatggacgccacgttgagttggctctttgggatacggctggacaagaagattacgaccgtctacgtcccttgtcatatcctgactcacatgttatccttatttgctttgctgttgattctcccgattctcttgacaatgttcaagaaaaatggatttccgaggttctccatttctgttccagtcttcctattttgcttgtcgcttgcaaggctgatctccgtaacgacccaaaaattattgaggagttatccaagactaatcagcatcccgtcaccacagaagaaggtcaagcagtagctcagaagattggtgcttacaaataccttgagtgttctgccaagacgaatgaaggtgttcgtgaggtttttgaatcagccactcgtgctgctatgctcaaacacaagcccaaagtgaagccctctagtggaactaagaagaagaagcgttgtatcttgttgtaa

SEQ ID NO: 96 - protein, 202 aa, Schizosaccharomyces pombe
MATELRRKLVIVGDGACGKTCLLIVFSKGTFPEVYVPTVFENYVADVEVDGRHVELALWDTAGQEDYDRLRPLSYPDSHVILICFAVDSPDSLDNVQEKWISEVLHFCSSLPILLVACKADLRNDPKIIEELSKTNQHPVTTEEGQAVAQKIGAYKYLECSAKTNEGVREVFESATRAAMLKHKPKVKPSSGTKKKKRCILL

SEQ ID NO: 97 - DNA, 603 bp, Schizosaccharomyces pombe
  CDS (1)..(603)
atgttgcaatctcaaccgattagaaggaaactagtagttgtaggcgatggtgcctgcgggaagacgtctttgttatccgttttcactttgggatattttcctactgaatatgttccgactgtgtttgaaaactatgtttcagattgtcgagttgatggaaaatcagttcaactggcattgtgggataccgcaggtcaagaggaatatgagagattaagaccaatgtcttacgctaaagcacacattattttggttgggtttgcgatagactctcctgattcacttgaaaatgtttctacgaagtggattgaggaaattaatacactttgcccaaatgttccgtttattttagtgggcatgaaagccgacttaaggtcagatcccgttgctattgaagaaatgcgacgtcgaaatcaaaattttgtaaaatcacaacaggctgaattagtagctcagcggattggtgcgagaaagtatatggaatgttcttcattgactggtgacggcgtggacgatgtatttgaagctgctactagggcagcactaacagttcgggattcggaaaatgacaagagttctacaaaatgctgcatcatttcataa

SEQ ID NO: 98 - protein, 200 aa, Schizosaccharomyces pombe
MLQSQPIRRKLVVVGDGACGKTSLLSVFTLGYFPTEYVPTVFENYVSDCRVDGKSVQLALWDTAGQEEYERLRPMSYAKAHIILVGFAIDSPDSLENVSTKWIEEINTLCPNVPFILVGMKADLRSDPVAIEEMRRRNQNFVKSQQAELVAQRIGARKYMECSSLTGDGVDDVFEAATRAALTVRDSENDKSSTKCCIIS

SEQ ID NO: 99 - DNA, 726 bp, Entamoeba histolytica
  CDS (97)..(687)
aaatgtaaagaacattaaaaataaaaaaacagtgaaaagaaatggattaaaaatagaatttcaaggaactgaaactcgtaattcaaaagaaaacacatgcaagctgtcaaatgtgtcattgttggggatggagctgtaggaaaaacttgtcttttaatttcttacactacaaatgcatttcctaatgaatatattccaacagtatttgataattattctgctactgttatggttgattcaaaaccaattaatcttggactttgggatactgctggacaagaagattatgatagattaagaccattgtcatatccacaaaccgatgtattcttaatttgtttctcagttgtttctccaccatcatttgataatgtctcatctaaatggcaaccagaagtttctcatcattgtccaaagactccttgtttattagttggaactaaacttgatatgagagaagataaagaacaattaaagagattagaagagaaaaaaattactccaatcactactgaacaaggtgaggctaaatgcaaagatattggagctgttaagtatatcgaatgttctgctttaactcaaaagaatttaagacttgtttttgatgaagctgttagagcagttatttctcctgcaggtggagcaaaaaaggataaaaagaataatagaggatgtttattattctaaattcgattcattccttttttaaacaacttacaaacaata

SEQ ID NO: 100 - protein, 196 aa, Entamoeba histolytica
MQAVKCVIVGDGAVGKTCLLISYTTNAFPNEYIPTVFDNYSATVMVDSKPINLGLWDTAGQEDYDRLRPLSYPQTDVFLICFSVVSPPSFDNVSSKWQPEVSHHCPKTPCLLVGTKLDMREDKEQLKRLEEKKITPITTEQGEAKCKDIGAVKYIECSALTQKNLRLVFDEAVRAVISPAGGAKKDKKNNRGCLLF

SEQ ID NO: 101 - DNA, 744 bp, Entamoeba histolytica
  CDS (145)..(729)
aaatataatcttaaaatagaaagaactgcaaaaactaaaaaacataaaaaaagaaactctagaaaagctattaaagtaacgaaaaaaacatgaaacaaagaaataatagacaactcagaactaaaaaaagttgaaagaaaatcaatgagtgaaaaacccacatcaatcaaattagtcgttgttggggatggtgctgttggaaaaacatgtttattaatttgctatacaactaatgaatttccaaaagattatattcctacagtattcgataattatgttgtgtcattaactgcaggcacaagacaaattcaattggcgttgtgggatactgctggacaagaagagtatgatcaattgagaccattgagttattcatctgcttcaatatttttaatatgtttctctgtcacaagttctgtatcatatgataatgtaattacaaaatggcaccctgaagttattcactttgcaccaaaagttcctattatattagttggaacaaaacttgatactagaaatgatcctgctattgttaaaagattaacagaacagggtatgactgttattaatactgcaaaaggagaagaacttaaaaatcgtataaaagctgtcaaatatattgaatgttctgcaaaaacaagcgaaaatttaaagacagttttcgatgaagcagttaaaactgtgttaatgaataaaccacagcaaaggtcaaagtgtgctcttttataattcacttttaaatta

SEQ ID NO: 102 - protein, 194 aa, Entamoeba histolytica
MSEKPTSIKLVVVGDGAVGKTCLLICYTTNEFPKDYIPTVFDNYVVSLTAGTRQIQLALWDTAGQEEYDQLRPLSYSSASIFLICFSVTSSVSYDNVITKWHPEVIHFAPKVPIILVGTKLDTRNDPAIVKRLTEQGMTVINTAKGEELKNRIKAVKYIECSAKTSENLKTVFDEAVKTVLMNKPQQRSKCALL

SEQ ID NO: 103 - DNA, 588 bp, Caenorhabditis elegans
  CDS (1)..(588)
atgcaagcaatcaaatgtgtcgtcgttggtgacggagccgtcggtaagacgtgtctcctgctatcgtacactacaaacgcttttcccggagaatatattctaacggtattcgacacctactcaacaaatgtgatggtcgacggaaggccaataaatctcagcctatgggacacagctggacaggacgattacgatcaattccgccacctgtcatttccacaaacagacgtattcctcgtatgctttgcactgaataatccagcaagttttgagaatgttcgtgcaaaatggtatccagaagtatcacatcattgcccaaatacaccgattattttggttggaactaaagctgatttacgcgaggatcgagatactattgaacggctccgtgaacgtcggctccaaccagtgagccacacccagggttacgtgatggcaaaggaaatcaaggcggtcaagtacctggaatgctcggcgcttacccaaattggattgaaacaagttttcgatgaggcaattcgtactgggctcaccccgccacaaacaccacaaacgagagccaaaaagagcaattgcacggtgctttaa

SEQ ID NO: 104 - protein, 195 aa, Caenorhabditis elegans
MQAIKCVVVGDGAVGKTCLLLSYTTNAFPGEYILTVFDTYSTNVMVDGRPINLSLWDTAGQDDYDQFRHLSFPQTDVFLVCFALNNPASFENVRAKWYPEVSHHCPNTPIILVGTKADLREDRDTIERLRERRLQPVSHTQGYVMAKEIKAVKYLECSALTQIGLKQVFDEAIRTGLTPPQTPQTRAKKSNCTVL

SEQ ID NO: 105 - DNA, 594 bp, Zea mays (maize)
  CDS (1)..(594)
atgagcgcgtccaggttcataaagtgcgtcacggtcggggacggcgccgtcggcaagacctgcatgctcatctcctacacctccaacaccttccccaccgactatgttccgacagtgtttgataacttcagtgccaacgttgtggttgatggtaatactgtcaacctcggcctctgggacactgcaggtcaagaggattacaacagactgagaccactgagctatcgtggagctgatgtttttcttctggctttctcactgatcagtaaggccagctatgagaatgtttcgaagaagtggatacctgaactgaagcattatgcacctggtgtgccaattattctcgtagggacaaagcttgatcttcgagacgacaagcagttctttgtggaccatcctggtgctgtccctatcactactgctcagggagaggagctaagaaagcaaataggcgctccatactacatcgaatgcagctcgaagacccaactaaacgtgaagggcgtctttgatgcggcgataaaggttgtgctgcagccgcctaaggcgaagaagaagaaaaaggtgcagaggggggcgtgctccattttgtga

SEQ ID NO: 106 - protein, 197 aa, Zea mays (maize)
MSASRFIKCVTVGDGAVGKTCMLISYTSNTFPTDYVPTVFDNFSANVVVDGNTVNLGLWDTAGQEDYNRLRPLSYRGADVFLLAFSLISKASYENVSKKWIPELKHYAPGVPIILVGTKLDLRDDKQFFVDHPGAVPITTAQGEELRKQIGAPYYIECSSKTQLNVKGVFDAAIKVVLQPPKAKKKKKVQRGACSIL

SEQ ID NO: 107 - DNA, 1058 bp, Zea mays (maize)
  CDS (176)..(769)
gaattcggcacgagagctctcaagacggccgacggccggcttgcctacctgctcccatccttcccgagggaccgagaaagataagaaaggcggtggtcaacttgtgtcctgaggtgcccgtagaagcccaaggacaagaaacaaggagaagagtagatctacatctactccaccgatgagcgcgtctcggttcatcaagtgcgtcaccgtgggggacggtgccgtcggaaagacctgcatgctcatctcctacacatccaacactttccccactgactatgttccaactgtgttcgacaacttcagtgccaatgttgtggttgacgggagcactgtcaacttgggtctgtgggatacagcaggacaagaagattacaatagactgcgtccgttgagctatcgtggtgctgatgtttttctgctcgccttttctcttatcagcaaagcaagctatgagaatgtctctaagaagtgggttcctgaattaaggcactatgctcctggcgtgcccataatccttgttgggacaaaacttgatctgcgtgatgataagcagttttttgttgatcaccctggtgctgttccaatttccactgcccagggcgaagagctgaggaagctaattggtgctgccgcctacatcgaatgcagttcaaaaatccagcagaacataaaagcagtgtttgacgcagcaattaaggtggttctccagccaccaaagcaaaagaagaggaagaagaaggtgcagaagggatgcaccattttgtaactacaaacggtagagggcaacagtctggctgcggcgctgctgccaatgataaccatcgcctccttgctgtataatatatcgcctgatcatgccaccagcatgcacaagggagatggtggttttaggatccttgtcctactgtgttgtgtagaccaccgggtgtagttgactgtatctggttgtttgtatgtatggacaagacaaaactagcactgcagatggtatggtaaggcgtaagcaaatacaatatgacattggtccagttccaggaaaaaaaaaaaaaaaaaaa

SEQ ID NO: 108 - protein, 197 aa, Zea mays (maize)
MSASRFIKCVTVGDGAVGKTCMLISYTSNTFPTDYVPTVFDNFSANVVVDGSTVNLGLWDTAGQEDYNRLRPLSYRGADVFLLAFSLISKASYENVSKKWVPELRHYAPGVPIILVGTKLDLRDDKQFFVDHPGAVPISTAQGEELRKLIGAAAYIECSSKIQQNIKAVFDAAIKVVLQPPKQKKRKKKVQKGCTIL

SEQ ID NO: 109 - DNA, 1045 bp, Zea mays (maize)
  CDS (45)..(707)
gaattcggcacgagctggctcgtgcagcggcggcagtgagagcgatgagcgcggcggcagcggcggcggcgagctcggtcaccaagttcatcaagtgcgtcacggtcggcgatggggccgtcgggaagacctgcatgctcatctgctacacctgcaacaagttccccacggattacatccccaccgtatttgacaacttcagcgccaatgtctccgtgggtgggagcatcgtcaacttgggcctctgggacacggcaggccaggaggattacagcaggttgaggcctctcagctacaggggtgctgatgtgttcatcctctccttctccctggtcagcagggcgagctatgagaacgtcctgaagaagtggatgccagagcttcgccgattttcacctactgttcctgtagttcttgttggaaccaaactagatctccgtgaagacagatcttaccttgctgaccattctgctgcttccatcatctctactgaacagggagaagagctcaggaagcagataggtgctgtggcgtacatagaatgcagctcaaagacacagaggaacgtaaaggctgtgttcgacactgcaattaaagtagtgctgcaaccaccgaggagaagagaagttaccaggaagaaaatgaagacaagttcgaatcagtctctgagaagatacctctgtggaagcggatgtttcacatcgtaaagcacagactcttctgcgactgttgtactggacttgctagatggttgcagctctatgaatgagtagtcccctccgcagccactgggaacttctggttctctgctaccttccgatagagtgctcttttgcgttcaccagctgagaaaaatgaagcgaggttctagtttataaattccctacgaggtgtaccttctttagtatgaatggtgggctatttagcagttcagcaaagtgtgaagtgacccttctatgcatgttttgtttccaaaaactgatgttgctaaatggctaatgaatggttatggtcgcaccggaagaaaaaaaaaaaaaaaaaaaaa

SEQ ID NO: 110 - protein, 220 aa, Zea mays (maize)
MSAAAAAAASSVTKFIKCVTVGDGAVGKTCMLICYTCNKFPTDYIPTVFDNFSANVSVGGSIVNLGLWDTAGQEDYSRLRPLSYRGADVFILSFSLVSRASYENVLKKWMPELRRFSPTVPVVLVGTKLDLREDRSYLADHSAASIISTEQGEELRKQIGAVAYIECSSKTQRNVKAVFDTAIKVVLQPPRRREVTRKKMKTSSNQSLRRYLCGSGCFTS

SEQ ID NO: 111 - DNA, 876 bp, Saccharomyces cerevisiae
  CDS (1)..(876)
atgaatacactattatttaagcgaaaaggtggcaattgtgggaacgaaagtaacatagtttcgcagggatcgccctcaagtagcaatcttcctgaatcacctggcactttagatgaaaagaatcttcccagattgcctactccattcgctagaagcctttctaccattcctagttatgagcagatgaaacgtacaaacaaactgccagattatcacctaaagattgttgttgtgggagatggcgctgtagggaagacgtgcctgctgatatcttatgtccaaggaacatttccgactgattatattcctactattttcgaaaattatgtcacaaacatagaaggacccaacggtcaaattatagaattggcattatgggacactgccggccaagaagagtatagtagacttagaccgctttcatatacgaatgcagatgtgctgatggtgtgctattctgttggtagtaagacatcgcttaaaaatgtggaagatctctggttcccagaggttaagcatttttgtccttccactccaatcatgctagtcggccttaaatcagatctatatgaagctgataacctttcagatctggtggaaccaagttcagcagaatccttggccaagcgtctgggggcatttgcacatattcaatgctcagcacgattgaaagaaaatatcgatgaagtatttgaaactgccatacacacgttactttccgattcattatatgctcccagagagcctacacatacaatcaaaaatccctttaaaagaaataccaccagatcagatatcgattcttctactggagataccagcgtctctatttccggaacgaaaagattaagaaaaaacaagtgtattataatgtaa

SEQ ID NO: 112 - protein, 291 aa, Saccharomyces cerevisiae
MNTLLFKRKGGNCGNESNIVSQGSPSSSNLPESPGTLDEKNLPRLPTPFARSLSTIPSYEQMKRTNKLPDYHLKIVVVGDGAVGKTCLLISYVQGTFPTDYIPTIFENYVTNIEGPNGQIIELALWDTAGQEEYSRLRPLSYTNADVLMVCYSVGSKTSLKNVEDLWFPEVKHFCPSTPIMLVGLKSDLYEADNLSDLVEPSSAESLAKRLGAFAHIQCSARLKENIDEVFETAIHTLLSDSLYAPREPTHTIKNPFKRNTTRSDIDSSTGDTSVSISGTKRLRKNKCIIM

SEQ ID NO: 113 - DNA, 696 bp, Saccharomyces cerevisiae
  CDS (1)..(696)
atgtcatttctatgtgggtcagcttcaacgtcaaataaaccgatcgaaagaaagatcgttattttgggcgacggtgcctgtggtaaaacttcgttgctgaatgttttcaccagaggttattttcccgaagtttatgagcctactgtttttgaaaactatatccatgatattttcgttgacagtaaacatatcacgctatcgttgtgggatactgcgggccaagaggaatttgacaggttacgatccttgtcttattcagatacgcaatgtataatgttatgtttcagtattgattcacgcgattctttagaaaatgtccaaaataaatgggtgggtgaaatcactgatcattgtgaaggcgtcaagttagtcttagttgcactaaagtgtgacttaagaaacaatgaaaatgaatctaacgcaatcacaccgaacaatatccaacaggataacagcgtttctaacgacaacggaaataacataaatagcacctcaaacggcaaaaacctgataagttatgaagaaggtctagctatggctaaaaagatcggtgcgctacgttatttggaatgtagcgctaagctgaataaaggtgtcaacgaagctttcacagaagccgcaagagttgctttaaccgcgggcccagtagcaaccgaagtgaaaagtgacagtggatccagctgtaccattatgtaa

SEQ ID NO: 114 - protein, 231 aa, Saccharomyces cerevisiae
MSFLCGSASTSNKPIERKIVILGDGACGKTSLLNVFTRGYFPEVYEPTVFENYIHDIFVDSKHITLSLWDTAGQEEFDRLRSLSYSDTQCIMLCFSIDSRDSLENVQNKWVGEITDHCEGVKLVLVALKCDLRNNENESNAITPNNIQQDNSVSNDNGNNINSTSNGKNLISYEEGLAMAKKIGALRYLECSAKLNKGVNEAFTEAARVALTAGPVATEVKSDSGSSCTIM

SEQ ID NO: 115 - DNA, 579 bp, Drosophila melanogaster
  CDS (1)..(579)
atgacgacgattcgcaagaaattggtaattgtcggcgacggtgcctgcggtaaaacttgccttctgattgtcttcagcaaagatcagttccccgaggtctatgtgcccaccgtattcgagaattatgtggccgacatcgaggtggatggcaaacaggtggagctggccttgtgggatacggccgggcaggaggactacgacagactacgaccgctgagctatcccgacactgacgtcatactgatgtgtttctcagtggattcacccgattcgctagaaaatattcctgaaaaatggaccccagaggtcaaacacttttgtccaaatgttccaatcattttggtaggaaataagaaagatttgcgaaatgatcccaacacaattcgggatctagcaaaaatgaagcaggagccggtgaagccgcaggagggtcgcgccatggccgagaagattaatgcctttgcctatttggagtgttcggctaagtccaaggagggtgtgcgagatgttttcgagacggcaactagggccgcgctgcaagtcaaaaagaggaagaagaccagatgccttttgctctaa

SEQ ID NO: 116 - protein, 192 aa, Drosophila melanogaster
MTTIRKKLVIVGDGACGKTCLLIVFSKDQFPEVYVPTVFENYVADIEVDGKQVELALWDTAGQEDYDRLRPLSYPDTDVILMCFSVDSPDSLENIPEKWTPEVKHFCPNVPIILVGNKKDLRNDPNTIRDLAKMKQEPVKPQEGRAMAEKINAFAYLECSAKSKEGVRDVFETATRAALQVKKRKKTRCLLL

SEQ ID NO: 117 - DNA, 579 bp, Drosophila melanogaster
  CDS (1)..(579)
atgcaggcgatcaagtgcgtcgtcgtgggcgacggagccgtgggaaagacctgcctgctgatcagctacacgaccaatgcctttcccggcgagtacatacccaccgtgttcgacaactactcggccaacgtgatggtggacgccaagcccatcaacctgggcctgtgggatacggccgggcaggaggactacgaccgactgaggccactgtcctatccccagaccgatgtcttcctcatctgcttctcgctggtgaatccggcatcgttcgagaacgtgcgggcaaagtggtatccggaggtgcgccaccactgccccagcacgcccatcatcctggtgggcaccaagctggatttgcgcgacgacaagaacacaatcgaaaagctgagggacaagaaactggcgcccatcacctatccgcagggctctggccatggcaaggaaatcggagcggtcaagtatctggagtgctcggccctgacgcagaagggtctgaaaaccgttttcgacgaggccatccggtcggttttgtgccccgtgctgcagcccaagtccaagcgcaagtgcgccctgctctaa

SEQ ID NO: 118 - protein, 192 aa, Drosophila melanogaster
MQAIKCVVVGDGAVGKTCLLISYTTNAFPGEYIPTVFDNYSANVMVDAKPINLGLWDTAGQEDYDRLRPLSYPQTDVFLICFSLVNPASFENVRAKWYPEVRHHCPSTPIILVGTKLDLRDDKNTIEKLRDKKLAPITYPQGSGHGKEIGAVKYLECSALTQKGLKTVFDEAIRSVLCPVLQPKSKRKCALL

SEQ ID NO: 119 - DNA, 579 bp, Drosophila melanogaster
  CDS (1)..(579)
atgcaggccatcaagtgtgtggttgtgggcgacggagcggtgggaaagacctgtctgctgatcagctatacgaccaacgccttccccggcgagtacatacccacggtgttcgacaactattcggcgaatgtgatggtggatgccaagcccatcaatctgggcctctgggatacggctggacaggaggactacgatcgcctgaggccgctatcctatccgcaaacggatgtctttctcatctgtttctcactggtgaatccggcatcgtttgagaatgtgcgagccaaatggtttcccgaggtgcgtcatcattgcccgagtgtgccgataatcctggtcggcaccaaactggatctgcgcgacgataagcagacgatcgagaagctgaaggacaagaagctaacaccgatcacctatccccaaggactggcgatggccaaggaaatagctgcggtcaagtatctggagtgctcggccctgacccaaaagggtctgaagacggtcttcgacgaggccatacgatccgtgctatgtcctgtcgttcgaggacccaagcggcacaagtgcgccctgctctaa

SEQ ID NO: 120 - protein, 192 aa, Drosophila melanogaster
MQAIKCVVVGDGAVGKTCLLISYTTNAFPGEYIPTVFDNYSANVMVDAKPINLGLWDTAGQEDYDRLRPLSYPQTDVFLICFSLVNPASFENVRAKWFPEVRHHCPSVPIILVGTKLDLRDDKQTIEKLKDKKLTPITYPQGLAMAKEIAAVKYLECSALTQKGLKTVFDEAIRSVLCPVVRGPKRHKCALL

SEQ ID NO: 121 - DNA, 913 bp, Gossypium hirsutum (upland cotton)
  CDS (12)..(602)
gagaaaaaacaatgagcactgcaagatttatcaagtgtgtcacggtcggtgatggagctgtggggaaaacttgtatgctcatttcatataccagcaatactttcccaacggattatgttccaacagtatttgataactttagtgccaatgtggtggtggatggcagcacagtgaaccttggcctatgggacactgccgggcaagaagattataataggctaaggccactgagttatagaggagctgatgtgtttttgttggccttttctcttataagcaaggccagttatgaaaacatctacaaaaagtggatcccagagctaagacattatgctcataatgtaccagttgtgcttgttggaaccaaactagatttgcgagatgacaagcagttcctcattgatcaccctggagcaacaccaatatcaacatctcagggagaagaactaaagaagatgataggagcagttacttatatagaatgcagctccaaaacccaacagaatgtgaaggctgttttcgatgctgcaataaaagtagctttgaggccaccaaaaccaaagagaaagccttgcaaaaggagaacatgtgctttcctttgaatattggatcattattacagtcaaaaacagttaacaaaagctgttgcagataaacactgaatctgctatagtttgtttttggtttacatatgttccacgtgaaactatgaagcatctctaagaaaacccaaactatcatatcaacccatcgatcaatgaatcgatttcaattttcgcagtataagttccttttaatcctttctttttacttcattttataacgaattctatggataatgttccctacaaacatgtcattacaatgtttaattataaattccattcttctattttactaaaaaaaaaaaaaa

SEQ ID NO: 122 - protein, 196 aa, Gossypium hirsutum (upland cotton)
MSTARFIKCVTVGDGAVGKTCMLISYTSNTFPTDYVPTVFDNFSANVVVDGSTVNLGLWDTAGQEDYNRLRPLSYRGADVFLLAFSLISKASYENIYKKWIPELRHYAHNVPVVLVGTKLDLRDDKQFLIDHPGATPISTSQGEELKKMIGAVTYIECSSKTQQNVKAVFDAAIKVALRPPKPKRKPCKRRTCAFL

SEQ ID NO: 123 - DNA, 1067 bp, Arabidopsis thaliana (mouse-ear cress)
  CDS (314)..(907)
cttttctctctctagttgttgttctctctctctctcgcatcctccaattcatcgtcctcacgttcccttttgtttattcatcttccttccttcttcacatttctgattttctctatttggggggtttgtttccacattatacatatctagggttttgagatggttaattgaaagataatggtcgaagtttcggaggaattggcttcacattgtgggtgtttctggcttcctcaggtttaaatctgaggttgatctcttttgttttttggtaaattgtgacatattttggctcgaagaagaagaagaagaggcaatgagcgcatcaaggttcataaagtgcgtcaccgttggtgatggagctgttggtaaaacctgtttgctgatttcttataccagcaacacctttcccacggattatgttccgactgttttcgataactttagtgcaaatgtggttgtcaatggggccacggtgaatcttggattgtgggatactgcagggcaagaggactataacaggttaagacctttgagttaccgtggtgctgatgttttcattcttgccttctctctcattagtaaggctagttatgagaatgtttccaagaagtggattccagagttgaagcactatgctcctggtgtcccaattgtccttgttggaaccaaactagatcttcgagatgacaaacagtttttcatcgaccatcctggtgctgtccctattaccactgttcagggagaggagctgaagaagctaattggagcgccagcttacatcgagtgcagttcaaaatcacaagagaacgtgaagggcgtgtttgatgcagcgatcagagtggtccttcaacctccaaagcagaagaaaaagaagaacaaagcacaaaaggcctgctccatcttgtaatagcactcatggaagtcaagaagctctttgagatgaggatgacagggtggtttaaaaaagtatcgctttttcatttttgttgttgttttccgttttcatttgtgatctcttagttccgtacaaaacgaattgtgaggttaattcaacttctattttaact

SEQ ID NO: 124 - protein, 197 aa, Arabidopsis thaliana (mouse-ear cress)
MSASRFIKCVTVGDGAVGKTCLLISYTSNTFPTDYVPTVFDNFSANVVVNGATVNLGLWDTAGQEDYNRLRPLSYRGADVFILAFSLISKASYENVSKKWIPELKHYAPGVPIVLVGTKLDLRDDKQFFIDHPGAVPITTVQGEELKKLIGAPAYIECSSKSQENVKGVFDAAIRVVLQPPKQKKKKNKAQKACSIL

SEQ ID NO: 125 - DNA, 695 bp, Arabidopsis thaliana (mouse-ear cress)
  CDS (1)..(594)
atgagcgcttcgaggttcataaagtgtgtcaccgttggcgacggagctgttggtaaaacctgtttgctgatttcttacaccagcaacacttttcctacggattatgtaccgactgttttcgataactttagcgcaaatgtggttgttaatggagccactgtgaatcttgggctatgggataccgcagggcaggaggattataacagattaagacctttgagttaccgcggtgctgatgttttcatcttagcattctctcttatcagtaaggctagttatgagaatgtctccaagaagtggatcccagagctgaagcattatgcccctggtgtccctatagttcttgttggaaccaaactagatcttcgggatgacaaacagttcttcattgaccaccctggcgctgtaccaattactactgctcagggagaggaactgaagaaactaattggagctcccgcatacatcgagtgcagttcaaaaacacaagagaacgtgaaaggagtatttgatgcagcgatccgagtggttcttcaacctccaaagcagaagaaaaagaaaagcaaagcacaaaaagcctgctccattttgtaatttctctacgcttctcttacgtatctctctctgtctctctgtctcttccactcttctagtgaaggcttaagaagaaaacacattgggcttaaaaattgttc

SEQ ID NO: 126 - protein, 197 aa, Arabidopsis thaliana (mouse-ear cress)
MSASRFIKCVTVGDGAVGKTCLLISYTSNTFPTDYVPTVFDNFSANVVVNGATVNLGLWDTAGQEDYNRLRPLSYRGADVFILAFSLISKASYENVSKKWIPELKHYAPGVPIVLVGTKLDLRDDKQFFIDHPGAVPITTAQGEELKKLIGAPAYIECSSKTQENVKGVFDAAIRVVLQPPKQKKKKSKAQKACSIL

SEQ ID NO: 127 - DNA, 630 bp, Arabidopsis thaliana (mouse-ear cress)
  CDS (1)..(630)
atgagtgcttcgaagttcataaaatgtgttactgttggagatggggctgttgggaagacatgtatgcttatctgttacactagcaacaagtttcctactgattatataccgactgtgttcgacaatttcagtgccaatgtagctgtggatggacaaatcgttaatttagggctatgggacactgccggtcaagaagattacagtaggttaagaccattgagttatagaggagctgatatcttcgtcttagccttttcgcttattagcaaggcgagttacgaaaatgtactcaagaagtggatgcctgaacttcgtcggtttgcgccaaatgttcccatagttcttgttggtacaaagctagatctccgggatgacaagggatacctcgcggatcacaccaatgtcattacctctactcagggagaggaattgaggaagcaaattggtgcagctgcttatattgagtgtagttccaagactcaacaaaatgtgaaagcagtgtttgatacagcgatcaaggtggttcttcagcctccaaggaggaaagaggtcccgaggaggaggaagaatcatagaagatccggttgctccattgcgagtattgtctgtggaggttgcaccgctgcttaa

SEQ ID NO: 128 - protein, 209 aa, Arabidopsis thaliana (mouse-ear cress)
MSASKFIKCVTVGDGAVGKTCMLICYTSNKFPTDYIPTVFDNFSANVAVDGQIVNLGLWDTAGQEDYSRLRPLSYRGADIFVLAFSLISKASYENVLKKWMPELRRFAPNVPIVLVGTKLDLRDDKGYLADHTNVITSTQGEELRKQIGAAAYIECSSKTQQNVKAVFDTAIKVVLQPPRRKEVPRRRKNHRRSGCSIASIVCGGCTAA

SEQ ID NO: 129 - DNA, 588 bp, Caenorhabditis elegans
  CDS (1)..(588)
atgtcttcaccgtcgaggcagatcaaatgtgtagttgttggagacggaacagttggaaaaacatgcatgttaatatcttacacaactgactcttttccagttcagtatgtgcctacagtatttgataactattcggcacagatgagtcttgatgggaacgttgtgaacttaggattgtgggatactgctggacaggaggattatgatcgtttacgaccactttcctacccacagacggatgttttcattctctgcttctctgtcgtctcgcccgtatcgtttgacaatgtggcaagcaagtggattccggaaatacgacagcattgtccagatgcgcctgtcattctagttggtaccaaactcgatttgcgcgacgaggccgaaccgatgcgtgctctgcaggccgaaggaaagtccccaatttccaaaacgcaaggcatgaaaatggctcaaaaaattaaagctgtcaagtatttggaatgctctgcattgacgcaacagggactcacacaggtgttcgaagacgccgtacggtccattcttcatccgaaaccacagaaaaagaagaagtcttgcaatattatgtaa

SEQ ID NO: 130 - protein, 195 aa, Caenorhabditis elegans
MSSPSRQIKCVVVGDGTVGKTCMLISYTTDSFPVQYVPTVFDNYSAQMSLDGNVVNLGLWDTAGQEDYDRLRPLSYPQTDVFILCFSVVSPVSFDNVASKWIPEIRQHCPDAPVILVGTKLDLRDEAEPMRALQAEGKSPISKTQGMKMAQKIKAVKYLECSALTQQGLTQVFEDAVRSILHPKPQKKKKSCNIM

SEQ ID NO: 131 - DNA, 843 bp, Arabidopsis thaliana (mouse-ear cress)
  CDS (90)..(683)
acgcgtcgagaaactccaattccaaaggctaaatctttgagatctttttttttataaatttctctgaaattaataaactttgaggggaaatgagcgcttcgaggttcgtaaagtgcgtgacggttggtgatggagctgtcggaaaaacttgtttgttgatttcttacacaagcaacactttccctacggattatgtgcctaccgttttcgataatttcagtgccaatgttgtggttaatggaagcactgtgaatcttggattgtgggacactgcagggcaagaggattacaatagattaagaccactgagttaccgtggagcagatgttttcattttggccttctctcttatcagtaaagccagttatgaaaacgtctccaaaaagtggatcccggagttgaaacattacgcgcctggtgtccccatcgtccttgttggaacaaagcttgatcttcgagatgataaacagttctttatcgaccatcctggtgctgttccgattactactgctcagggagaggagctgaggaagcaaataggagcacctacttacatcgaatgcagttccaaaactcaagagaatgtgaaggcggtgtttgacgcagccatccgagtggtgttgcaaccgccaaagcagaagaagaagaagagcaaagcgcagaaggcatgctccattctatgatgattggaaatctctgtttttatgtatttggttttggtatattaatcttatatcaatgaatgaattaatgtgttaatggacagacacccaagtttgactggtcctttttgttcttaatattaatggagtttgtcggaaaaaaaaaaaaaaaaaaaaaaaa

SEQ ID NO: 132 - protein, 197 aa, Arabidopsis thaliana (mouse-ear cress)
MSASRFVKCVTVGDGAVGKTCLLISYTSNTFPTDYVPTVFDNFSANVVVNGSTVNLGLWDTAGQEDYNRLRPLSYRGADVFILAFSLISKASYENVSKKWIPELKHYAPGVPIVLVGTKLDLRDDKQFFIDHPGAVPITTAQGEELRKQIGAPTYIECSSKTQENVKAVFDAAIRVVLQPPKQKKKKSKAQKACSIL

SEQ ID NO: 133 - DNA, 841 bp, Arabidopsis thaliana (mouse-ear cress)
  CDS (28)..(633)
aaggaattgaagacaaaagcaaagaaaatgagcacagcaagattcattaagtgtgtgactgtcggagatggagcagtgggaaagacttgtatgctcatttcatataccagcaatacgtttcctacggattatgttccaacagttttcgacaacttcagcgcaaatgtggtggtcgacgggagtaccgtgaaccttggcctgtgggatactgccggtcaggaagattataataggcttaggcctttgagttacagaggagcagatgtcttcttattagcattttcccttataagcaaggccagttacgagaatattcacaaaaagtggcttccggagctgaaacattatgctcctggcatccccattgtgctcgtcggaacaaaattagatttgagggatgacaagcagttcttgaaggatcatccaggagcagcttctataacaactgctcagggagaagaattaaggaaaatgattggagctgttaggtacttagagtgcagctccaaaacccaacagaatgtgaaggcagtgtttgatacagcgataagggtagctttgaggccaccaaaggcaaagaaaaagataaaaccattgaagactaagagatcaagaatatgctttttcctataatatctgaacagatttcaataaataacaaacatttatatatacttgtattttgatatttttttgaatattttctacttgaaatagtggactttgcttcatcacgttattggcgagagtattgtcgaatcatgttaccattattcgggagaaatttgtaaaatagtagtaatttggcaagaaaattgaggattgatattttttccccata

SEQ ID NO: 134 - protein, 201 aa, Arabidopsis thaliana (mouse-ear cress)
MSTARFIKCVTVGDGAVGKTCMLISYTSNTFPTDYVPTVFDNFSANVVVDGSTVNLGLWDTAGQEDYNRLRPLSYRGADVFLLAFSLISKASYENIHKKWLPELKHYAPGIPIVLVGTKLDLRDDKQFLKDHPGAASITTAQGEELRKMIGAVRYLECSSKTQQNVKAVFDTAIRVALRPPKAKKKIKPLKTKRSRICFFL

SEQ ID NO: 135 - DNA, 784 bp, Arabidopsis thaliana (mouse-ear cress)
  CDS (1)..(591)
atgagtgcttcgaggtttataaagtgtgtcaccgtcggcgatggtgccgtcggaaaaacttgtatgctgatttcttacacaagcaacactttccctacggactatgttccaactgttttcgacaacttcagtgctaatgtggttgtagatgggaacacggtgaatcttggattgtgggatacagctggtcaagaagactataacaggttaagaccgttgagttaccgtggtgccgatgtcttcattcttgcattctcgcttattagcaaagctagctacgagaatgtagccaagaagtggattcctgagcttaggcattatgcccctggtgttcctataatcctcgttggaacgaaactcgatcttcgagatgacaagcaattcttcatagaccatcctggtgcagtgcctattactacaaaccagggagaggaactaaagaaactgataggatcaccaatctacattgaatgtagttcaaagactcagcagaatgtgaaagcagtctttgacgcagccataaaagtggtgcttcagccaccgaaacagaagaagaagaaaaagaacaagaaccgctgcgtgttcttgtgatcgaacatctcttaaaacgaaaaaaggtttaggtaacaaaagaagctgaaggaaaacgaacacctgcaacattgtatagttgttgaatccggcttgtttcggtctttactcttctttttgctggtgaatctaatgagtgaactgaggccaagaggaggattctgggtaagagaaggggatgtgttcttttctt

SEQ ID NO: 136 - protein, 196 aa, Arabidopsis thaliana (mouse-ear cress)
MSASRFIKCVTVGDGAVGKTCMLISYTSNTFPTDYVPTVFDNFSANVVVDGNTVNLGLWDTAGQEDYNRLRPLSYRGADVFILAFSLISKASYENVAKKWIPELRHYAPGVPIILVGTKLDLRDDKQFFIDHPGAVPITTNQGEELKKLIGSPIYIECSSKTQQNVKAVFDAAIKVVLQPPKQKKKKKNKNRCVFL

SEQ ID NO: 137 - DNA, 679 bp, Arabidopsis thaliana (mouse-ear cress)
  CDS (1)..(648)
atggcttcaagtgcttcaaagttcatcaagtgtgtgactgttggtgatggtgctgttggtaaaacctgtatgctcatctgctacaccagcaataaattccccactgactacataccaacagtttttgacaactttagtgcaaatgttgttgttgaaggcaccactgtcaatttggggctttgggacactgctgggcaagaagactataacagattaaggcctttaagttacaggggagcagatgttttcgtcttgtctttctcattagtcagccgagctagctacgagaatgtttttaaaaagtggatccctgaactccaacactttgctccaggagttccccttgtccttgttggtaccaaattagatcttcgtgaagataagcattatttggctgatcatcctggactatcccctgtaactactgcacagggagaggagttgcgtaagctaattggtgcgacgtattacattgagtgtagttcaaaaactcaacagaatgtgaaagcagtttttgattctgcgataaaggaagtgatcaaacctctggttaaacaaaaggagaagactaagaagaagaagaagcaaaagtcgaatcacggctgtttatcaaatgttctgtgtgggaggatagtgactcggcattgatgacgatgacccaactcagtctgatgatttt

SEQ ID NO: 138 - protein, 215 aa, Arabidopsis thaliana (mouse-ear cress)
MASSASKFIKCVTVGDGAVGKTCMLICYTSNKFPTDYIPTVFDNFSANVVVEGTTVNLGLWDTAGQEDYNRLRPLSYRGADVFVLSFSLVSRASYENVFKKWIPELQHFAPGVPLVLVGTKLDLREDKHYLADHPGLSPVTTAQGEELRKLIGATYYIECSSKTQQNVKAVFDSAIKEVIKPLVKQKEKTKKKKKQKSNHGCLSNVLCGRIVTRH

SEQ ID NO: 139 - DNA, 630 bp, Saccharomyces cerevisiae
  CDS (1)..(630)
atgtcacaacaagttggtaacagtatcagaagaaagctggtaatcgttggtgatggtgcctgtggtaagacatgtttattaatcgtcttttccaagggccaatttccagaagtctacgtaccaactgtctttgaaaactatgtagcagatgttgaagttgatgggcgtcgtgtagagctagcgctatgggataccgctggtcaagaagattatgatagactaagaccattgtcatacccagactccaatgtcgtattaatttgtttctctatcgatcttccagattctttagagaatgtacaagaaaaatggattgccgaagtattacatttctgtcaaggtgtgccaattattcttgttggttgtaaagtggatttgagaaacgacccacaaaccattgaacaattaagacaagaaggtcaacaacccgttacatcacaggagggacaatctgtagcagaccagattggcgcaaccggatactacgaatgttcggccaagactggttatggtgtcagagaagtgtttgaggccgccactagagcttcattgatgggtaaatctaaaacgaatggtaaagctaagaagaacactactgaaaagaagaagaagaagtgtgtcttgttatag

SEQ ID NO: 140 - protein, 209 aa, Saccharomyces cerevisiae
MSQQVGNSIRRKLVIVGDGACGKTCLLIVFSKGQFPEVYVPTVFENYVADVEVDGRRVELALWDTAGQEDYDRLRPLSYPDSNVVLICFSIDLPDSLENVQEKWIAEVLHFCQGVPIILVGCKVDLRNDPQTIEQLRQEGQQPVTSQEGQSVADQIGATGYYECSAKTGYGVREVFEAATRASLMGKSKTNGKAKKNTTEKKKKKCVLL

SEQ ID NO: 141 - DNA, 987 bp, Aplysia californica (California sea hare)
  CDS (14)..(592)
  MISC_FEATURE (980)..(981): n is a, t, c, or g
ccaagtgccaaccatggcagcgatacgaaagaagcttgttatagtcggagatggtgcgtgtggtaaaacatgtctacttattgtcttcagcaaagaccagttccctgaagtttacgtgccaacagtttttgaaaattatgtagcagacattgaagttgatggcaaacaggttgagctagctctgtgggacacagcgggacaagaggactatgacagactgaggccgctgtcttaccctgacacagatgtcatcctcatgtgtttctctatagacagtccagacagtctggagaacataccggagaagtggacgcctgaggttcgtcacttttgtccaaatgttcctataatacttgtgggtaacaaaaaggatcttcgcaacgatgaaagtaccaaacgtgagctcatgaaaatgaaacaggaaccagtgagaccagaggatgggcgcgccatggctgagaaaatcaacgcctactcttatcttgagtgctctgctaaaaccaaggagggcgtgagggatgtgtttgagacagctaccagagctgcgctgcaagtgaaaaagaagaagaagggtggatgtgttgtattgtgaataagtcgctgttttcttcaattccccacaacagggctggtgaaaggaggactgcatgaaattttgtcttttgaagatattccttttaaaattattttttttaaaataccaattttcaacttaagattgttcaattataattagtgcaaaaagacggatgcttcccgactgaaacacaagaaaggccatatcagagtggcatatgatcacagtcatattttgtggcttgtgtgattgcatatatatttaagaacaaatataagcgtcaactatctatggctggagaatgaggtaatggaaatgttttatttgagtaaattcctcatctgcaaaaagtttgtactacagttgagtaaaatttcaagcattgtctcctttacaaattgtnngccccc

SEQ ID NO: 142 - protein, 192 aa, Aplysia californica (California sea hare)
MAAIRKKLVIVGDGACGKTCLLIVFSKDQFPEVYVPTVFENYVADIEVDGKQVELALWDTAGQEDYDRLRPLSYPDTDVILMCFSIDSPDSLENIPEKWTPEVRHFCPNVPIILVGNKKDLRNDESTKRELMKMKQEPVRPEDGRAMAEKINAYSYLECSAKTKEGVRDVFETATRAALQVKKKKKGGCVVL

SEQ ID NO: 143 - DNA, 579 bp, Homo sapiens (man)
  CDS (1)..(579)
atgcaggccatcaagtgtgtggtggtgggagacggagctgtaggtaaaacttgcctactgatcagttacacaaccaatgcatttcctggagaatatatccctactgtctttgacaattattctgccaatgttatggtagatggaaaaccggtgaatctgggcttatgggatacagctggacaagaagattatgacagattacgccccctatcctatccgcaaacagatgtgttcttaatttgcttttcccttgtgagtcctgcatcatttgaaaatgtccgtgcaaagtggtatcctgaggtgcggcaccactgtcccaacactcccatcatcctagtgggaactaaacttgatcttagggatgataaagacacgatcgagaaactgaaggagaagaagctgactcccatcacctatccgcagggtctagccatggctaaggagattggtgctgtaaaatacctggagtgctcggcgctcacacagcgaggcctcaagacagtgtttgacgaagcgatccgagcagtcctctgcccgcctcccgtgaagaagaggaagagaaaatgcctgctgttgtaa

SEQ ID NO: 144 - protein, 192 aa, Homo sapiens (man)
MQAIKCVVVGDGAVGKTCLLISYTTNAFPGEYIPTVFDNYSANVMVDGKPVNLGLWDTAGQEDYDRLRPLSYPQTDVFLICFSLVSPASFENVRAKWYPEVRHHCPNTPIILVGTKLDLRDDKDTIEKLKEKKLTPITYPQGLAMAKEIGAVKYLECSALTQRGLKTVFDEAIRAVLCPPPVKKRKRKCLLL

SEQ ID NO: 145 - DNA, 642 bp, Homo sapiens (man)
  CDS (1)..(642)
atgcccggagccggccgcagcagcatggctcacgggcccggcgcgctgatgctcaagtgcgtggtggtcggcgacggggcggtgggcaagacgtgcctactcatgagctatgccaacgacgccttcccggaggagtacgtgcccaccgtcttcgaccactacgcagtcagcgtcaccgtggggggcaagcagtacctcctaggactctatgacacggccggacaggaagactatgaccgtctgaggcctttatcttacccaatgaccgatgtcttccttatatgcttctcggtggtaaatccagcctcatttcaaaatgtgaaagaggagtgggtaccggaacttaaggaatacgcaccaaatgtaccctttttattaataggaactcagattgatctccgagatgaccccaaaactttagcaagactgaatgatatgaaagaaaaacctatatgtgtggaacaaggacagaaactagcaaaagagataggagcatgctgctatgtggaatgttcagctttaacccagaagggattgaagactgtttttgatgaggctatcatagccattttaactccaaagaaacacactgtaaaaaaaagaataggatcaagatgtataaactgttgtttaattacgtga

SEQ ID NO: 146 - protein, 213 aa, Homo sapiens (man)
MPGAGRSSMAHGPGALMLKCVVVGDGAVGKTCLLMSYANDAFPEEYVPTVFDHYAVSVTVGGKQYLLGLYDTAGQEDYDRLRPLSYPMTDVFLICFSVVNPASFQNVKEEWVPELKEYAPNVPFLLIGTQIDLRDDPKTLARLNDMKEKPICVEQGQKLAKEIGACCYVECSALTQKGLKTVFDEAIIAILTPKKHTVKKRIGSRCINCCLIT

SEQ ID NO: 147 - DNA, 582 bp, Homo sapiens (man)
  CDS (1)..(582)
atggctgcaatccgaaagaagctggtgatcgttggggatggtgcctgtgggaagacctgcctcctcatcgtcttcagcaaggatcagtttccggaggtctacgtccctactgtctttgagaactatattgcggacattgaggtggacggcaagcaggtggagctggctctgtgggacacagcagggcaggaagactatgatcgactgcggcctctctcctacccggacactgatgtcatcctcatgtgcttctccatcgacagccctgacagcctggaaaacattcctgagaagtggaccccagaggtgaagcacttctgccccaacgtgcccatcatcctggtggggaataagaaggacctgaggcaagacgagcacaccaggagagagctggccaagatgaagcaggagcccgttcggtctgaggaaggccgggacatggcgaaccggatcagtgcctttggctaccttgagtgctcagccaagaccaaggagggagtgcgggaggtgtttgagatggccactcgggctggcctccaggtccgcaagaacaagcgtcggaggggctgtcccattctctga

SEQ ID NO: 148 - protein, 193 aa, Homo sapiens (man)
MAAIRKKLVIVGDGACGKTCLLIVFSKDQFPEVYVPTVFENYIADIEVDGKQVELALWDTAGQEDYDRLRPLSYPDTDVILMCFSIDSPDSLENIPEKWTPEVKHFCPNVPIILVGNKKDLRQDEHTRRELAKMKQEPVRSEEGRDMANRISAFGYLECSAKTKEGVREVFEMATRAGLQVRKNKRRRGCPIL

SEQ ID NO: 149 - DNA, 576 bp, Homo sapiens (man)
  CDS (1)..(576)
atgcagagcatcaagtgcgtggtggtgggtgatggggctgtgggcaagacgtgcctgctcatctgctacacaactaacgctttccccaaagagtacatccccaccgtgttcgacaattacagcgcgcagagcgcagttgacgggcgcacagtgaacctgaacctgtgggacactgcgggccaggaggagtatgaccgcctccgtacactctcctaccctcagaccaacgttttcgtcatctgtttctccattgccagtccgccgtcctatgagaacgtgcggcacaagtggcatccagaggtgtgccaccactgccctgatgtgcccatcctgctggtgggcaccaagaaggacctgagagcccagcctgacaccctacggcgcctcaaggagcagagccaggcgcccatcacaccgcagcagggccaggcactcgcgaaacagatccacgctgtgcgctacctcgaatgctcagccctgcaacaggatggtgtcaaggaagtgttcgccgaggctgtccgggctgtgctcaaccccacgccgatcaagcgtgggcggtcctgcatcctcttgtga

SEQ ID NO: 150 - protein, 191 aa, Homo sapiens (man)
MQSIKCVVVGDGAVGKTCLLICYTTNAFPKEYIPTVFDNYSAQSAVDGRTVNLNLWDTAGQEEYDRLRTLSYPQTNVFVICFSIASPPSYENVRHKWHPEVCHHCPDVPILLVGTKKDLRAQPDTLRRLKEQSQAPITPQQGQALAKQIHAVRYLECSALQQDGVKEVFAEAVRAVLNPTPIKRGRSCILL

SEQ ID NO: 151 - DNA, 2292 bp, Homo sapiens
  CDS (1)..(2292)
atggtgagcaagggcgaggagctgttcaccggggtggtgcccatcctggtcgagctggacggcgacgtaaacggccacaagttcagcgtgtccggcgagggcgagggcgatgccacctacggcaagctgaccctgaagttcatctgcaccaccggcaagctgcccgtgccctggcccaccctcgtgaccaccctgggctacggcctgcagtgcttcgcccgctaccccgaccacatgaagcagcacgacttcttcaagtccgccatgcccgaaggctacgtccaggagcgcaccatcttcttcaaggacgacggcaactacaagacccgcgccgaggtgaagttcgagggcgacaccctggtgaaccgcatcgagctgaagggcatcgacttcaaggaggacggcaacatcctggggcacaagctggagtacaactacaacagccacaacgtctatatcaccgccgacaagcagaagaacggcatcaaggccaacttcaagatccgccacaacatcgaggacggcggcgtgcagctcgccgaccactaccagcagaacacccccatcggcgacggccccgtgctgctgcccgacaaccactacctgagctaccagtccgccctgagcaaagaccccaacgagaagcgcgatcacatggtcctgctggagttcgtgaccgccgccctcgagaaagagaaagagcggccagagatttctctcccttcagattttgaacacacaattcatgtcggttttgatgctgtcacaggggagtttacgggaatgccagagcagtgggcccgcttgcttcagacatcaaatatcactaagtcggagcagaagaaaaacccgcaggctgttctggatgtgttggagttttacaactcgaagaagacatccaacagccagaaatacatgagctttacagataagtcagcttccggaggtggaaccggtggtggaggtaccatgcaggccatcaagtgtgtggtggtgggagacggagctgtaggtaaaacttgcctactgatcagttacacaaccaatgcatttcctggagaatatatccctactgtctttgacaattattctgccaatgttatggtagatggaaaaccggtgaatctgggcttatgggatacagctggacaagaagattatgacagattacgccccctatcctatccgcaaacagatgtgttcttaatttgcttttcccttgtgagtcctgcatcatttgaaaatgtccgtgcaaagtggtatcctgaggtgcggcaccactgtcccaacactcccatcatcctagtgggaactaaacttgatcttagggatgataaagacacgatcgagaaactgaaggagaagaagctgactcccatcacctatccgcagggtctagccatggctaaggagattggtgctgtaaaatacctggagtgctcggcgctcacacagcgaggcctcaagacagtgtttgacgaagcgatccgagcagtccgcggccgcatggtgagcaagggcgaggagctgttcaccggggtggtgcccatcctggtcgagctggacggcgacgtaaacggccacaagttcagcgtgtccggcgagggcgagggcgatgccacctacggcaagctgaccctgaagttcatctgcaccaccggcaagctgcccgtgccctggcccaccctcgtgaccaccctgacctggggcgtgcagtgcttcagccgctaccccgaccacatgaagcagcacgacttcttcaagtccgccatgcccgaaggctacgtccaggagcgcaccatcttcttcaaggacgacggcaactacaagacccgcgccgaggtgaagttcgagggcgacaccctggtgaaccgcatcgagctgaagggcatcgacttcaaggaggacggcaacatcctggggcacaagctggagtacaactacatcagccacaacgtctatatcaccgccgacaagcagaagaacggcatcaaggccaacttcaagatccgccacaacatcgaggacggcagcgtgcagctcgccgaccactaccagcagaacacccccatcggcgacggccccgtgctgctgcccgacaaccactacttgagcacccagtccgccctgagcaaagaccccaacgagaagcgcgatcacatggtcctgctggagttcgtgaccgccgccgggatcactctcggcatggacgagctgggccgctctagaaagatgagcaaagatggtaaaaagaagaaaaagaagtcaaagacaaagtgtgtaattatgtaa

SEQ ID NO: 152 - protein, 763 aa, Homo sapiens
MVSKGEELFTGVVPILVELDGDVNGHKFSVSGEGEGDATYGKLTLKFICTTGKLPVPWPTLVTTLGYGLQCFARYPDHMKQHDFFKSAMPEGYVQERTIFFKDDGNYKTRAEVKFEGDTLVNRIELKGIDFKEDGNILGHKLEYNYNSHNVYITADKQKNGIKANFKIRHNIEDGGVQLADHYQQNTPIGDGPVLLPDNHYLSYQSALSKDPNEKRDHMVLLEFVTAALEKEKERPEISLPSDFEHTIHVGFDAVTGEFTGMPEQWARLLQTSNITKSEQKKNPQAVLDVLEFYNSKKTSNSQKYMSFTDKSASGGGTGGGGTMQAIKCVVVGDGAVGKTCLLISYTTNAFPGEYIPTVFDNYSANVMVDGKPVNLGLWDTAGQEDYDRLRPLSYPQTDVFLICFSLVSPASFENVRAKWYPEVRHHCPNTPIILVGTKLDLRDDKDTIEKLKEKKLTPITYPQGLAMAKEIGAVKYLECSALTQRGLKTVFDEAIRAVRGRMVSKGEELFTGVVPILVELDGDVNGHKFSVSGEGEGDATYGKLTLKFICTTGKLPVPWPTLVTTLTWGVQCFSRYPDHMKQHDFFKSAMPEGYVQERTIFFKDDGNYKTRAEVKFEGDTLVNRIELKGIDFKEDGNILGHKLEYNYISHNVYITADKQKNGIKANFKIRHNIEDGSVQLADHYQQNTPIGDGPVLLPDNHYLSTQSALSKDPNEKRDHMVLLEFVTAAGITLGMDELGRSRKMSKDGKKKKKKSKTKCVIM

SEQ ID NO: 153 - DNA, 2289 bp, Homo sapiens
  CDS (1)..(2289)
atggtgagcaagggcgaggagctgttcaccggggtggtgcccatcctggtcgagctggacggcgacgtaaacggccacaagttcagcgtgtccggcgagggcgagggcgatgccacctacggcaagctgaccctgaagttcatctgcaccaccggcaagctgcccgtgccctggcccaccctcgtgaccaccctgggctacggcctgcagtgcttcgcccgctaccccgaccacatgaagcagcacgacttcttcaagtccgccatgcccgaaggctacgtccaggagcgcaccatcttcttcaaggacgacggcaactacaagacccgcgccgaggtgaagttcgagggcgacaccctggtgaaccgcatcgagctgaagggcatcgacttcaaggaggacggcaacatcctggggcacaagctggagtacaactacaacagccacaacgtctatatcaccgccgacaagcagaagaacggcatcaaggccaacttcaagatccgccacaacatcgaggacggcggcgtgcagctcgccgaccactaccagcagaacacccccatcggcgacggccccgtgctgctgcccgacaaccactacctgagctaccagtccgccctgagcaaagaccccaacgagaagcgcgatcacatggtcctgctggagttcgtgaccgccgccctcgagaaagagaaagagcggccagagatttctctcccttcagattttgaacacacaattcatgtcggttttgatgctgtcacaggggagtttacgggaatgccagagcagtgggcccgcttgcttcagacatcaaatatcactaagtcggagcagaagaaaaacccgcaggctgttctggatgtgttggagttttacaactcgaagaagacatccaacagccagaaatacatgagctttacagataagtcagcttccggaggtggaaccggtggtggaggtacccagacaattaagtgtgttgttgtgggcgatggtgctgttggtaaaacatgtctcctgatatcctacacaacaaacaaatttccatcggaatatgtaccgactgtttttgacaactatgcagtcacagttatgattggtggagaaccatatactcttggactttttgatactgcagggcaagaggattatgacagattacgaccgctgagttatccacaaacagatgtatttctagtctgtttttcagtggtctctccatcttcatttgaaaacgtgaaagaaaagtgggtgcctgagataactcaccactgtccaaagactcctttcttgcttgttgggactcaaattgatctcagagatgacccctctactattgagaaacttgccaagaacaaacagaagcctatcactccagagactgctgaaaagctggcccgtgacctgaaggctgtcaagtatgtggagtgttctgcacttacacagagaggtctgaagaatgtgtttgatgaggctatcctagctgccggcggccgcatggtgagcaagggcgaggagctgttcaccggggtggtgcccatcctggtcgagctggacggcgacgtaaacggccacaagttcagcgtgtccggcgagggcgagggcgatgccacctacggcaagctgaccctgaagttcatctgcaccaccggcaagctgcccgtgccctggcccaccctcgtgaccaccctgacctggggcgtgcagtgcttcagccgctaccccgaccacatgaagcagcacgacttcttcaagtccgccatgcccgaaggctacgtccaggagcgcaccatcttcttcaaggacgacggcaactacaagacccgcgccgaggtgaagttcgagggcgacaccctggtgaaccgcatcgagctgaagggcatcgacttcaaggaggacggcaacatcctggggcacaagctggagtacaactacatcagccacaacgtctatatcaccgccgacaagcagaagaacggcatcaaggccaacttcaagatccgccacaacatcgaggacggcagcgtgcagctcgccgaccactaccagcagaacacccccatcggcgacggccccgtgctgctgcccgacaaccactacttgagcacccagtccgccctgagcaaagaccccaacgagaagcgcgatcacatggtcctgctggagttcgtgaccgccgccgggatcactctcggcatggacgagctgggccgctctagaaagatgagcaaagatggtaaaaagaagaaaaagaagtcaaagacaaagtgtgtaattatgtaa

SEQ ID NO: 154 - protein, 762 aa, Homo sapiens
MVSKGEELFTGVVPILVELDGDVNGHKFSVSGEGEGDATYGKLTLKFICTTGKLPVPWPTLVTTLGYGLQCFARYPDHMKQHDFFKSAMPEGYVQERTIFFKDDGNYKTRAEVKFEGDTLVNRIELKGIDFKEDGNILGHKLEYNYNSHNVYITADKQKNGIKANFKIRHNIEDGGVQLADHYQQNTPIGDGPVLLPDNHYLSYQSALSKDPNEKRDHMVLLEFVTAALEKEKERPEISLPSDFEHTIHVGFDAVTGEFTGMPEQWARLLQTSNITKSEQKKNPQAVLDVLEFYNSKKTSNSQKYMSFTDKSASGGGTGGGGTQTIKCVVVGDGAVGKTCLLISYTTNKFPSEYVPTVFDNYAVTVMIGGEPYTLGLFDTAGQEDYDRLRPLSYPQTDVFLVCFSVVSPSSFENVKEKWVPEITHHCPKTPFLLVGTQIDLRDDPSTIEKLAKNKQKPITPETAEKLARDLKAVKYVECSALTQRGLKNVFDEAILAAGGRMVSKGEELFTGVVPILVELDGDVNGHKFSVSGEGEGDATYGKLTLKFICTTGKLPVPWPTLVTTLTWGVQCFSRYPDHMKQHDFFKSAMPEGYVQERTIFFKDDGNYKTRAEVKFEGDTLVNRIELKGIDFKEDGNILGHKLEYNYISHNVYITADKQKNGIKANFKIRHNIEDGSVQLADHYQQNTPIGDGPVLLPDNHYLSTQSALSKDPNEKRDHMVLLEFVTAAGITLGMDELGRSRKMSKDGKKKKKKSKTKCVIM

SEQ ID NO: 155 - DNA, 1139 bp, Arabidopsis thaliana
  CDS (66)..(875)
tcgacccacgcgtccggtctagtcttttatattgtagataatatttctatctggacataacaacaatggcagatgcaaacgaagtagtggaatgggccaacaatttaaagtgggataaatatgctggaaataaagaaattgttgatggattggccgctttgagacaaaaaatcacagctttggacggcgctgaaggaggctctggtggcaatcaaagagttaaattagtagttgtcggtgatggtgccgtcggcaaaacatctctgttgatttcattcgctgaaaacaaattccctgaggattacgtccctacagtcttcgaaaactacacttctaaaatcactcgcgacgatggtacacttgttctgttgcatttgtgggatacagccggtcaagaggactacgaccgattgagacctttgagttatcctggcgctgatgtcatcctgctctgtttctccaccgtcactgcctcgtcattcgcctccattaaagaaaagtggtaccccgaagtcaaccactacgtgcccgatgctccttatattttggtcggcaccaagctcgacttgcgtgaggctggtctgcccgatccctccactggtgagtcagatcccgtcacccccgagaaggctgaggagatgcgaaagcaaatcaaagcgttgaagtatattgaagtctctgccaagacacgaaagaacttgcagactctgttttcagaagccgtggacattgtcttggctgaacgacgcgcacacgagcctcccaagcccaccgctgcttcatcgacgaacggcactaacggcactaagactgagcacactcctcgcgaagagcccatccgaaagaagaaggagcgtcgctgcttgttgatgtaagagccctgtgattggtcactctaacatcgactcgagatctgcactattactattttatttgtcgtttttaactttatttaatcaaaaaaccctttcaaccaataagccacgataagagtcgtgcagtcaaatttattttggtagcccttggatctgctatcaagattttcttgtattatcgacttgtaattaataggactgtagcgatatcgtgcttctttatttatttcaataaaaacaaaaaattaaaaaaaaaaaaaaaaa

SEQ ID NO: 156 - protein, 269 aa, Arabidopsis thaliana
MADANEVVEWANNLKWDKYAGNKEIVDGLAALRQKITALDGAEGGSGGNQRVKLVVVGDGAVGKTSLLISFAENKFPEDYVPTVFENYTSKITRDDGTLVLLHLWDTAGQEDYDRLRPLSYPGADVILLCFSTVTASSFASIKEKWYPEVNHYVPDAPYILVGTKLDLREAGLPDPSTGESDPVTPEKAEEMRKQIKALKYIEVSAKTRKNLQTLFSEAVDIVLAERRAHEPPKPTAASSTNGTNGTKTEHTPREEPIRKKKERRCLLM

SEQ ID NO: 157 - DNA, 582 bp, Caenorhabditis elegans
  CDS (1)..(582)
atgcaagcaatcaaatgtgtcgtcgttggtgacggagccgtcggtaagacgtgtctcctgctatcgtacactacaaacgcttttcccggagaatatattctaacggtgttcgacacctactcaacaaatgtgatggtcgacggacggccaataaatctcagcctatgggacacagctggacaggaagattacgatcaattccgccaacatttccacaaaaaatttccacaaacagacgtatttctcgtatgctttgcattgaataataatgttcgtgcaaaatggtatccagaagtatcacatcattgcccaaatacaccgattattttggttggaacgaaagctgatttgcgcgaggatcgagatactgttgaacggctccgcgaaagccggctccaaccagtgagccacacccagggttacgtgatggcaaaggaaatcaaggcggtcaagtacctggaatgctcggcgcttacccaaattggattgaaacaagttttcgatgaggcaattcgtactgggctcaccccgccacaaacaccacaaacgagagccaaaaagagcaattgcacggtgctttaa

SEQ ID NO: 158 - protein, 193 aa, Caenorhabditis elegans
MQAIKCVVVGDGAVGKTCLLLSYTTNAFPGEYILTVFDTYSTNVMVDGRPINLSLWDTAGQEDYDQFRQHFHKKFPQTDVFLVCFALNNNVRAKWYPEVSHHCPNTPIILVGTKADLREDRDTVERLRESRLQPVSHTQGYVMAKEIKAVKYLECSALTQIGLKQVFDEAIRTGLTPPQTPQTRAKKSNCTVL

SEQ ID NO: 159 - DNA, 576 bp, Ciona savignyi
  CDS (1)..(576)
atgcaaactataaagtgtgtagttgttggagatggtgctgtgggtaaaacctgtttgctaatatcctataccacaaacaagtttccacaagaatatgttccaacggtcttcgacaactatgccgtcactgttatgatcggaggggaaccatacacattgggtttatttgatactgcaggccaggaagattatgacaggttaaggcctctcagttatccacaaactgatgtgtttttggtttgtttttctgttgtatcaccgtcatcatatgaaaatataaaagaaaagtgggtcccggaaatcacccatcattgtccaaagacgccatttttattggttggaacccaggttgatttgcgagatgatgctgcaacaattgaaaaactttcaaagaacaaacagaaagctataactccagatttgggtgataaactggcaagagagttaaaagcagtaaaatatgtcgagtgctctgcccttactcaaaaaggattaaagaatgtatttgatgaagctattttagctgctttagagccaccggagcctaaaagacgtcgccgatgtcaaattttgtga

SEQ ID NO: 160 - protein, 191 aa, Ciona savignyi
MQTIKCVVVGDGAVGKTCLLISYTTNKFPQEYVPTVFDNYAVTVMIGGEPYTLGLFDTAGQEDYDRLRPLSYPQTDVFLVCFSVVSPSSYENIKEKWVPEITHHCPKTPFLLVGTQVDLRDDAATIEKLSKNKQKAITPDLGDKLARELKAVKYVECSALTQKGLKNVFDEAILAALEPPEPKRRRRCQIL

SEQ ID NO: 161 - DNA, 757 bp, Cryptococcus neoformans
  CDS (9)..(602)
cacacaccatgtccggagaaatcaggagaaagctcgttattgtcggcgacggtgcttgtggtaagacatgtcttcttatcgtgttcagcaagggcatgttccccgaggtgtacgtgcccaccgtctttgaaaactatgtcgccgatgtagaggtggacgggaagaaggtcgagctggcgttgtgggatactgctggacaggaggactatgaccgactccgacctctttcttaccccgactcccatgtcattctcatctgtttcgctattgactcccccgactcgcttgacaatgttcaagaaaagtggatttccgaggtccttcacttctgtcagggtctccccatcgtcctcgtggcgtgcaagaaggatctccgcgacgatggcaagactatccaggaccttgccaggatgaaccagaggcctgtttcccgggccgagggtatggccgttgcccaaaagattggggcgcagggctacgtcgagtgcagtgccaagacgggcgagggtgtcagggaagtgttccagactgctaccaggcatgctctccagagcaaaaagtccaagtctggcagagggaagaagggttgtgtggtgctttagggctctataaatcgagttgtactttatcttgttcgtcgctggcgtctttatacctctttctcttcacgccattctcacgccttggcccaagtgtttggggcttattctctcttttacttgctgtgatttgatgaatcgatgagtagttatgcccg

SEQ ID NO: 162 - protein, 197 aa, Cryptococcus neoformans
MSGEIRRKLVIVGDGACGKTCLLIVFSKGMFPEVYVPTVFENYVADVEVDGKKVELALWDTAGQEDYDRLRPLSYPDSHVILICFAIDSPDSLDNVQEKWISEVLHFCQGLPIVLVACKKDLRDDGKTIQDLARMNQRPVSRAEGMAVAQKIGAQGYVECSAKTGEGVREVFQTATRHALQSKKSKSGRGKKGCVVL

SEQ ID NO: 163 - DNA, 626 bp, Gallus gallus
  CDS (27)..(605)
tctcggcggcgcgccatcgcgggcagatgcaggcgatcaagtgtgtggtggtgggcgacggagctgtagggaagacctgcttgctgatcagttacaccacgaatgcctttcctggagagtacatccccactgtatttgataactattctgccaatgtcatggtagatgggaagccagtgaatctaggcctctgggatacagcaggacaagaggattatgaccgactgcggcctctttcctacccacagacagatgttttcttgatttgcttctccctcgtgagtccagcctcctttgagaatgtcagagccaagtggtaccctgaggtccgacaccactgcccaaatacacctatcatcttggtgggcaccaagctggacttaagggatgataaggacaccattgaaaggttacgtgataagaaactggctcccatcacctacccccaaggtttggccatggctcgggagattggctcggtaaagtaccttgagtgctctgccctgacacagcggggcttgaagacggtgtttgatgaagccatccgggctgtgctctgcccaccgcccgtgaagaagcctggcaaaaagtgcaccgtgttctgagggctgtggcctaggtgctgg

SEQ ID NO: 164 - protein, 192 aa, Gallus gallus
MQAIKCVVVGDGAVGKTCLLISYTTNAFPGEYIPTVFDNYSANVMVDGKPVNLGLWDTAGQEDYDRLRPLSYPQTDVFLICFSLVSPASFENVRAKWYPEVRHHCPNTPIILVGTKLDLRDDKDTIERLRDKKLAPITYPQGLAMAREIGSVKYLECSALTQRGLKTVFDEAIRAVLCPPPVKKPGKKCTVF

SEQ ID NO: 165 - DNA, 731 bp, Gallus gallus
  CDS (48)..(638)
cggccatcgtcctgctgcacggcaaggccagcttggcgagcctggccatggccgccatccgcaagaagctggtggtggtgggagacggcgcctgtggcaagacctgcctcctcatcgtcttcagcaaggacgagttccccgaggtttacgtgcccaccgtctttgagaactacgtggccgacatcgaggtggacggcaagcaggtggagctggcgctgtgggacacggccggccaggaggactacgaccgcctgcgccctctctcctacccagacacggacgtgatcctcatgtgcttctcagtggacagcccggactcgctggagaacatcccggagaagtgggtgcccgaagtcaagcacttctgccccaacgtccccatcatcctggtggccaacaagaaagacctgcgcaacgacgagcacgtgcgtaacgagctggcccgcatgaagcaggagccggtgcgcactgaggatggccgcgccatggccatccgcatccaggcctacgactacctggagtgctcggccaagaccaaggagggtgtgcgggaggtctttgagacggccacccgggcggccttgcagaagcgctacggcactcagaacggctgcatcaattgctgcaaggtcctatagggcccggctggagccggcgctgggcacggctctgggtcacctgttggcaggcggagaggagctggggcacgcatgcacacagcatctgcctgt

SEQ ID NO: 166 - protein, 196 aa, Gallus gallus
MAAIRKKLVVVGDGACGKTCLLIVFSKDEFPEVYVPTVFENYVADIEVDGKQVELALWDTAGQEDYDRLRPLSYPDTDVILMCFSVDSPDSLENIPEKWVPEVKHFCPNVPIILVANKKDLRNDEHVRNELARMKQEPVRTEDGRAMAIRIQAYDYLECSAKTKEGVREVFETATRAALQKRYGTQNGCINCCKVL

SEQ ID NO: 167 - DNA, 883 bp, Hemicentrotus pulcherrimus
  CDS (61)..(639)
cgggtgtaatctgcctcttcctggtactattttatgaaatttgtgtgaaaacctaagacaatggctgctataaggaaaaagttggttatcgtaggagatggtgcttgtgggaagacgtgtctgctcatagtatttagcaaagaccagttccctgaagtctatgtcccaacagtttttgagaactatgtagctgatatagaagtagacggtaaacaggttgagttggcattatgggatacagcaggtcaggaagactacgacagactgagaccgctctcatatccagacacagacgttatactcatgtgcttttcaatcgacaacccagacagtttagaaaccatcccagaaaaatggacaccagaggtgaagcacttttgccctaatgtacctgtcatcttggtcggcaacaagaaagatcttcgaaatgacgatgccacaaaacgggaactgagtaagatgaagcaggaaccggtgaaatataatgatgcccagaccatgtcagataagatcaacgcctacaaatacctagaatgctcagccaagtctaacgatggtgtcagggaagtgtttgagacagcaaccagagcagcactacaagttaaaaagaagaagtcatcaaaatgcagcctcttgtaagagaagtcttcatgcaagctggcaaggcatggtagtggtcaacaagaggtcctcaaagaataatgcatttaatatacatgtatgtgtttggggaaaagagcgattatgtaatatttctggatgtgctttgaaggtcaaagacagcggtagtgccagcatactttgtttaattgctgttgtgataataagaggcaatcggcttaattttgtagttgcagatttacgaaaccacttttctttcttt

SEQ ID NO: 168 - protein, 192 aa, Hemicentrotus pulcherrimus
MAAIRKKLVIVGDGACGKTCLLIVFSKDQFPEVYVPTVFENYVADIEVDGKQVELALWDTAGQEDYDRLRPLSYPDTDVILMCFSIDNPDSLETIPEKWTPEVKHFCPNVPVILVGNKKDLRNDDATKRELSKMKQEPVKYNDAQTMSDKINAYKYLECSAKSNDGVREVFETATRAALQVKKKKSSKCSLL

SEQ ID NO: 169 - DNA, 958 bp, Arabidopsis thaliana
  CDS (146)..(742)
gtcgacccacgcgtccggagagactttcagcagctatttctttgtcttctttctctataaagaacctcactctctctctctttagtcaaaaatccccaattcgtgaacaaattagggtttttgaagtttgaagaaggagagaaagatgagtgcttcaaggtttatcaagtgtgtcactgtcggcgacggtgctgttggaaagacttgtcttctcatctcctacactagcaacactttccccacggattatgtgccaactgtgttcgataatttcagtgccaatgtgattgttgatggcaacactatcaacttgggattgtgggatactgcagggcaagaggactacaatagactaagacctttgagctatcgcggtgcagatgtcttcttacttgcattctcacttgtcagcaaagctagctatgaaaatgtttctaaaaagtgggttcctgaactgagacattatgctcctggtgttcccatcatcctcgttggaacaaagcttgatcttcgacatgataagcaattctttgccgagcaccctggtgctgtgcctatctctaccgctcagggtgaagaactaaagaagctgattggggcgcctgcttatatcgaatgcagtgcaaaaactcaacagaatgtgaaagcagtgtttgatgcggctatcaaggtcgttctccagccaccaaaaaacaagaagaagaagaagagaaaatctcagaaaggttgttctatactctgattcaacaagaagaaaggaatcaacaggagaattagagctataagtatttgttttctcctttttcataacttgtttacccaaggaatcaaaaatctgttgtttgtagtctgaaaatgacaaaagttgaagaactagtaacaagtatttgtattcttgtttgcattttgatctgtaaatataccacgaatccttgatttctctgtttcctaaaaaaaa

SEQ ID NO: 170 - protein, 198 aa, Arabidopsis thaliana
MSASRFIKCVTVGDGAVGKTCLLISYTSNTFPTDYVPTVFDNFSANVIVDGNTINLGLWDTAGQEDYNRLRPLSYRGADVFLLAFSLVSKASYENVSKKWVPELRHYAPGVPIILVGTKLDLRHDKQFFAEHPGAVPISTAQGEELKKLIGAPAYIECSAKTQQNVKAVFDAAIKVVLQPPKNKKKKKRKSQKGCSIL

SEQ ID NO: 171 - DNA, 780 bp, Anopheles gambiae str
  CDS (208)..(780)
gcggccgcaaaagcaaatgaaaagttgaactgaaacttccaagcgcacaaagtcgagccgtgaggtgttttccttgtttttccgtgttcgagtgtgtgtgtggtggttctgtgtttcgtacgtgtgcggtgcgcgtttgtgttggaggtgtttcggtttgtattttcttcgtgtttccagtttgtttttcctaggtttcgctaaaagatgtcatccggaagacctatcaaatgtgtggtggtcggcgacggcacggtggggaagacgtgcatgttgatcagctacacgaccgacagctttcccggcgaatacgtacccacggtcttcgacaactactccgccccgatggtggtggacggtgtgcaagtgtcgctcgggctgtgggatacggccgggcaggaagactacgatcggctaaggcccctgtcctacccacagacggacgtgttcctcatatgctacagtgtggccagcccgtcgtcgttcgaaaacgttacctccaaatggtatcccgagatcaagcaccactgcccggatgcgcccatcattttagtcggaaccaaaatcgatctgcgcgaggatcgggaaacgataagcttgctggcggaccagggcctttccgcgctgaagcgcgaacagggccaaaagctagcgaacaagatacgggcggtaaagtatatggaatgttcggcactaacccagcggggcctaaagcaggtgtttgacgaagcgctttgcgccacggaagagaaagagcgaatgccggtagaagaggagtag

SEQ ID NO: 172 - protein, 190 aa, Anopheles gambiae str
MSSGRPIKCVVVGDGTVGKTCMLISYTTDSFPGEYVPTVFDNYSAPMVVDGVQVSLGLWDTAGQEDYDRLRPLSYPQTDVFLICYSVASPSSFENVTSKWYPEIKHHCPDAPIILVGTKIDLREDRETISLLADQGLSALKREQGQKLANKIRAVKYMECSALTQRGLKQVFDEALCATEEKERMPVEEE

SEQ ID NO: 173 - DNA, 657 bp, Giardia lamblia ATCC 50803
  CDS (1)..(657)
atgactagtacaggaaatgaggatacagcgggtgcaaggatgatacatatcaaagccgtagtggttggagacggctcagtgggcaagacctgccttctttttgtctatgcgaataactcatttccagaggactacttgccaacagtctttgacaactattctgccaacgtcgttgttgacaacttgacgataaatattggtctctgggatactgcgggccaggaggattacgacaaattgcgacccttgagctatccaggggcgcacgtatttttgctctgctttagcgtcgtttccagcacttcgtttgcaaacatcagatccaaatggtacacagaggtcaaggagtactgtccaaacgtgccgatgatccttgtcggaacaaagtatgacctgctgtccgacgaggcttacctggccaagatgaaagagaagaaccaatccccggtgtctgatgaacgtgcagaggaagttgcaaaagagataaaggccattaagtacattagctgcagtgcccgatgccaacttcgcgtaaaggacgtgtttgatagtgcaatccgcgcggctctcaagaatatggggatgatgggtagtgggacttccaaggcaggaaagaaaaaggatggatctggaaagggaaagtgtgttatattctag

SEQ ID NO: 174 - protein, 218 aa, Giardia lamblia ATCC 50803
MTSTGNEDTAGARMIHIKAVVVGDGSVGKTCLLFVYANNSFPEDYLPTVFDNYSANVVVDNLTINIGLWDTAGQEDYDKLRPLSYPGAHVFLLCFSVVSSTSFANIRSKWYTEVKEYCPNVPMILVGTKYDLLSDEAYLAKMKEKNQSPVSDERAEEVAKEIKAIKYISCSARCQLRVKDVFDSAIRAALKNMGMMGSGTSKAGKKKDGSGKGKCVIF

SEQ ID NO: 175 - DNA, 624 bp, Neurospora crassa
  CDS (1)..(624)
atggtgacgggaactatcaagtatgccaaaacaaaccaccccttatcgagagagtgcgtagtcgtcggtgacggtgccgttggaaagacatgtctcctcatcagctatacaacgaataagttcccctcggaatatgtgccgacagttttcgacaactatgccgtcaccgtcatgatcggtgatgagccctatacgctcggcctgttcgatacagcaggacaagaagattacgaccgtttacgtccgctatcatacccccagaccgacgtcttcctcatctgcttcagcgttgcatcgcccgcctcgttcgaaaacgtgtcccagaaatgggcccccgaagtcaaccatcactgccccggcgtgcccttcctcatcgtcggaacgcagaaggatttgcgctccgacaaggaactgagggacaagcttgcccagcgcaagcagtcgatgatagagttcaagcagggagagaagcttgctcaggatcttgacgccgtcaaatacgtcgagtgcagtgcgctgacacaggaaggtctcaagaacgtgtttgacgaggccatcgttgcggcactggagccgcctcagaaaaagacaagtaaaagggacaagaagtgcttgattctgtga

SEQ ID NO: 176 - protein, 207 aa, Neurospora crassa
MVTGTIKYAKTNHPLSRECVVVGDGAVGKTCLLISYTTNKFPSEYVPTVFDNYAVTVMIGDEPYTLGLFDTAGQEDYDRLRPLSYPQTDVFLICFSVASPASFENVSQKWAPEVNHHCPGVPFLIVGTQKDLRSDKELRDKLAQRKQSMIEFKQGEKLAQDLDAVKYVECSALTQEGLKNVFDEAIVAALEPPQKKTSKRDKKCLIL

SEQ ID NO: 177 - DNA, 603 bp, Neurospora crassa
  CDS (1)..(603)
atggcatcaggcagccctcagaatgtcatccgcaggaaactcgtcattatcggcgacggtgcttgcggaaaaaccagtctactgagcgtcttcactttgggttttttcccagccacatatatccccaccgtgttcgagaattacgttaccgactgccgagtagatggcaagtcggttcaactagcgctatgggacacagccggacaagaagactatgagcgattacgaccactagcatactcaaaggcgcatgtcattctaatagggttttctgtcgacacgccagattctttggacaacgttaaacacaagtgggttactgaggccaatgaaagatgtcccaatgttcccatcattttggtgggtctcaagaaggatctcaggggagatcctgttgccatcgaagaaatgcgaaagcgatcccaacgattcgtgatggaggacgaaggccagaggatagcaaaggagattggcgctcgaaagtatctcgaatgttccagtcttaccggagaaggtgttgacgacgtattcgaggcagccacgcgagcggcgctgctaacgtttgagaagaaggaaggaagcgggtgctgtgtgattctatga

SEQ ID NO: 178 - protein, 200 aa, Neurospora crassa
MASGSPQNVIRRKLVIIGDGACGKTSLLSVFTLGFFPATYIPTVFENYVTDCRVDGKSVQLALWDTAGQEDYERLRPLAYSKAHVILIGFSVDTPDSLDNVKHKWVTEANERCPNVPIILVGLKKDLRGDPVAIEEMRKRSQRFVMEDEGQRIAKEIGARKYLECSSLTGEGVDDVFEAATRAALLTFEKKEGSGCCVIL

SEQ ID NO: 179 - DNA, 624 bp, Neurospora crassa
  CDS (1)..(624)
atgccttgcggactcggagggtcgaaaacagtgcagcgcaagctcgtcttgctcggcgatggtgcctgcggaaaaacctcactgctcaacgttttcacaagaggctatttccccactgtatacgagccgacagtcttcgagaactatgtgcacgacattttcgtcgacaatgtccatattgaactgtcattgtgggataccgccggccaggaagaatttgacaggctacgaagtctatcatacgatgacaccgacttaatcatgctttgctactctgtcgacagcaaggactcgctcgaaaacgtcgaaagcaaatggcaaggcgagattgctgaaaactgcccgggcgtcaagattgtcttggtcgcgttgaagtgcgacctgcgcgaggcgaccgaggacgaagaggatggcggagccaacgaggacggtgctcaacgtgagaagaagccaatgatcagctacgaccagggcctggaagtggctcgccggatcaaggcccttcgatatctcgaatgctccgccatgcgaaaccggggagtcaacgaagccttcaccgaagcagcgcgtgtcgctttgtcagtgaagaaggaccgggaggagtcgaagtgcgtggtcatgtaa

SEQ ID NO: 180 - protein, 207 aa, Neurospora crassa
MPCGLGGSKTVQRKLVLLGDGACGKTSLLNVFTRGYFPTVYEPTVFENYVHDIFVDNVHIELSLWDTAGQEEFDRLRSLSYDDTDLIMLCYSVDSKDSLENVESKWQGEIAENCPGVKIVLVALKCDLREATEDEEDGGANEDGAQREKKPMISYDQGLEVARRIKALRYLECSAMRNRGVNEAFTEAARVALSVKKDREESKCVVM

SEQ ID NO: 181 - DNA, 645 bp, Gallus gallus
  CDS (1)..(645)
atgcccgggggagggcgggctccggccatggcccatggcagcgccgcggtcatgctgaagtgcgtggtggtgggggacggcgccgtgggcaagacgtgcctgctgatgagctacgccaacgacgccttccctgaggagtacgtgcccaccgtcttcgaccactacgcagtcagcgttaccgtggagggcaagcagtacctgctggggctctacgacaccgccgggcaggaagactatgaccgtctgagacctttatcttatcctatgaccgatgtcttccttatctgcttctcagtggtaaaccctgcttcatttcaaaacgtgaaggaagaatgggtaccggagttgaaggaatatgcacctaatgttccttttttactagtaggaacacagattgatcttcgtgatgaccccaaaactctggcaagattgaatgatatgaaagagaagcctttatctgtggaacaaggacagaaattagcaaaagagataggagcctactgctatgtggagtgttcagctttaacacagaaaggactgaagactgtttttgatgaagctattatagccattctaactccaaagaaacacacggtgaagaagagaataggttcgagatgcataaactgctgtttgatcacgtga

SEQ ID NO: 182 - protein, 214 aa, Gallus gallus
MPGGGRAPAMAHGSAAVMLKCVVVGDGAVGKTCLLMSYANDAFPEEYVPTVFDHYAVSVTVEGKQYLLGLYDTAGQEDYDRLRPLSYPMTDVFLICFSVVNPASFQNVKEEWVPELKEYAPNVPFLLVGTQIDLRDDPKTLARLNDMKEKPLSVEQGQKLAKEIGAYCYVECSALTQKGLKTVFDEAIIAILTPKKHTVKKRIGSRCINCCLIT

SEQ ID NO: 183 - DNA, 582 bp, Brachydanio rerio
  CDS (1)..(582)
atggctgcaattcgaaagaaacttgtcatagtcggtgatggagcctgtggaaagacctgtttgctcatagttttcagtaaagatcagtttcccgaagtctacgtgccgacagtcttcgagaactacgttgcagatatcgaggtcgattcaaaacaggttgagcttgccttatgggatactgctggacaggaggactatgatcggttaagacccctctcctatcctgacacagatgttattctcatgtgcttctccatcgacagtcctgatagcttggaaaatatcccagaaaaatggacaccagaggtgaagcatttctgtcccaatgttcccatcatcctcgtgggtaacaaaaaggatctccggaatgatgagcacacacgaagggaacttgccaaaatgaaacaggagccggtaaagccagaagaagggcgagacatggccaaccgaatcaatgcctttggttatctagagtgttcggccaaaacaaaagatggcgtgagagaagtctttgaaatggccaccagggcggcgctgcaagccagaaaacgtggtaaaaagagcggctgcctgctgttataa

SEQ ID NO: 184 - protein, 193 aa, Brachydanio rerio
MAAIRKKLVIVGDGACGKTCLLIVFSKDQFPEVYVPTVFENYVADIEVDSKQVELALWDTAGQEDYDRLRPLSYPDTDVILMCFSIDSPDSLENIPEKWTPEVKHFCPNVPIILVGNKKDLRNDEHTRRELAKMKQEPVKPEEGRDMANRINAFGYLECSAKTKDGVREVFEMATRAALQARKRGKKSGCLLL

SEQ ID NO: 185 - DNA, 582 bp, Brachydanio rerio
  CDS (1)..(582)
atggcggctatcaggaaaaagctggtgatcgtgggagatggagcatgtgggaagacctgtctactcatagtgttcagcaaagaccagtttccagaagtctacgtgcctactgtgttcgagaactacattgctgacattgaagtcgacagcaaacaggtggagctggcattgtgggacacagcaggacaggaggactatgaccgtctcagacctctgtcttacccagacacagatgtcatcctcatgtgcttctccatagacagtcccgacagtttagagaatatcccagaaaagtggacgccggaggtaaagcacttctgccccaacgttcccataatcctggtgggcaataagagagatctgcgtactgatgagaacacacggagggagctgactaagatgaagcaggagccagttaaaatagaagagggcagggacatggctaaccgcattagcgccttcggctacctggaatgctcagctaagactaaggatggcgtgagggaagtttttgaaatggccaccagagcggcgctgcaggttcgcaagaggaagaagaggagcgggtgctcactgttgtga

SEQ ID NO: 186 - protein, 193 aa, Brachydanio rerio
MAAIRKKLVIVGDGACGKTCLLIVFSKDQFPEVYVPTVFENYIADIEVDSKQVELALWDTAGQEDYDRLRPLSYPDTDVILMCFSIDSPDSLENIPEKWTPEVKHFCPNVPIILVGNKRDLRTDENTRRELTKMKQEPVKIEEGRDMANRISAFGYLECSAKTKDGVREVFEMATRAALQVRKRKKRSGCSLL

SEQ ID NO: 187 - DNA, 806 bp, Ciona intestinalis
  CDS (1)..(750)
atggaaaggatacccaatgacgtcaaaggtgctttccccgagcagcaacccaaaattaaatgtgttatagttggggatggtggatgcggtaaaacttcaatgctggttgtatatactgaaggcgaattccctgaagtgtacacgcccacggtgtttgaaaattacagcagagaggtggaattaaatcgaaagaaggcggtgctaacattgtgggatacggcgggtcaggaagattatgaccggcttcgacctctctcttacaacaacgcagacatcataatcatctgctatgacgtcacaaacctttcaagcttccagaacgtagaaatccgatggtcgccagaaatccgccatttttgcccccacacgcctacgatgctggttgcgtgtaaaactgacctgaggtctcaggtgaactcggattcaatttcaaactctatgactcgatctgcttccatggcaaccacattaacaacaactggagtagatttaacagaaatgacgtcatctacgttaagtgtaaattcggtacgcgcagaagatggaacagacagacacgatgatcaagcaatagttacaacagaaatgggcgagaagatgtcgaaacacatcaacgtcaatcattttgttgaatgttctgccaaggatggcacaaacattgaacaagtatttaaacttgcaatcgaatgcgtcattaaacgtgaagcaaaagtcggtccaaaaaactgctgctgttgtttgctattgtgatacgctgttacgtaaataaattgactgtgtaggaaatgcctaacaaatcaatcgcg

SEQ ID NO: 188 - protein, 249 aa, Ciona intestinalis
MERIPNDVKGAFPEQQPKIKCVIVGDGGCGKTSMLVVYTEGEFPEVYTPTVFENYSREVELNRKKAVLTLWDTAGQEDYDRLRPLSYNNADIIIICYDVTNLSSFQNVEIRWSPEIRHFCPHTPTMLVACKTDLRSQVNSDSISNSMTRSASMATTLTTTGVDLTEMTSSTLSVNSVRAEDGTDRHDDQAIVTTEMGEKMSKHINVNHFVECSAKDGTNIEQVFKLAIECVIKREAKVGPKNCCCCLLL

SEQ ID NO: 189 - DNA, 726 bp, Ciona intestinalis
  CDS (14)..(598)
ttgagttcatgaaatgcagtctataaaattggtcgtggtgggcgatggtgccgtgggaaaaacgtgtctacttatcagctacacggcgaatgcctttccaagggagtatgttccgaccgtgtttgaaaactacatggcaaatatcacggtcaacaatcagcaaatttgcttaagtctttgggataccgctggtcaagaggattttgacaggttgagaccgctttcatatccagacaccgatgtctttgttctctgcttctcgataatttctccaacctcctttgaaaatctccagcacaaatggttgcccgagttacgagaacattgtcctaatgtgcccatcctgctagtgggtacgaagcttgacttgagagaagacaccgaaattctacaacagctttcctcgaaaaatctaaaaccaataacaccagaagaaggggcgaaaatggcgaaagatattaaagcagttaaatatttagagtgttctgctctaactcaggagtgtctcagccaagtatttgatgacgctgttattgcagtgctaaacccatcacacttttcaagtaacaatgacaacagctgttgtaagatcgtttaaatttacatctcgttgtttacttacagtgttatgtgtattaacattaccgtgatacacacacgagttcatagggttaaaaacgagagttatattttctttaaaattagataaacactcattcccgtcaa

SEQ ID NO: 190 - protein, 194 aa, Ciona intestinalis
MQSIKLVVVGDGAVGKTCLLISYTANAFPREYVPTVFENYMANITVNNQQICLSLWDTAGQEDFDRLRPLSYPDTDVFVLCFSIISPTSFENLQHKWLPELREHCPNVPILLVGTKLDLREDTEILQQLSSKNLKPITPEEGAKMAKDIKAVKYLECSALTQECLSQVFDDAVIAVLNPSHFSSNNDNSCCKIV

SEQ ID NO: 191 - DNA, 827 bp, Ciona intestinalis
  CDS (34)..(615)
atttgtaaggacgagaaccaacacaacaaaataatgcagtccgtgaaatgtgttgtggttggagatggagctgttggtaaaacctgtttgctgatcagctacacaaccaatgctttccctggagaatatattcccactgtgtttgaaagctatgctgcaaatgttgtggtggatgggaacccagtgaacatcggtttatgggacacagctggccaggaagattacgataaacttcgaccgctatcatacccacagtcagatgtctttgtcatgtgcttctcgttggtaaacccaacatcttatgaaaacattgcagaaaaatggtatccggaagttcatgaacactgtcccgacatccccattgtactcgttgggacaaaactggatttacgtgaagacccagaaacactcaaaacgttgggtgagagaaatcttgttccagttaccaaaacccagggcctccagttggcgaaaaaagttggggcaaagaaatattttgagtgctcggcgcttactcgtgaaaacttagacgaactctttcttgaagcaatgcgcaatgccctgaaaggaccggacaaaattgtaaaagagaaaccaaattgtcaaattatctaatcagcatttaagaattttgagttaacgctcgaataattgttcagtatacaactgtataccaaagtccataaaaataaaaattaaaactatagactttgctgtacacattatacatgtcgttaccgcatgtggtgtagcttaaacgattgtgcaatacctttatattaaaggttaatgttttacagtcgtgagtaactggaactctctgcgta

SEQ ID NO: 192 - protein, 193 aa, Ciona intestinalis
MQSVKCVVVGDGAVGKTCLLISYTTNAFPGEYIPTVFESYAANVVVDGNPVNIGLWDTAGQEDYDKLRPLSYPQSDVFVMCFSLVNPTSYENIAEKWYPEVHEHCPDIPIVLVGTKLDLREDPETLKTLGERNLVPVTKTQGLQLAKKVGAKKYFECSALTRENLDELFLEAMRNALKGPDKIVKEKPNCQII

SEQ ID NO: 193 - DNA, 718 bp, Ciona intestinalis
  CDS (6)..(584)
aagatatgcaagcgataaagtgcgttgtggttggagatggagctgttggtaaaacctgtttgctgatcagctacacaactaacgctttccctggagaatatattcccactgtgtttgataactactctgccaatgtcatggtagatggccgccctgtcaacttgggattatgggatacagcaggacaggaggattatgacagactccgacctctctcctacccacaaaccgatgtttttctcatttgtttctctgtggcttctcccgcttcctacgaaaacgtgcgcgcaaagtggcacccggaggtcgcacaccactgcccggaaacgcccgtacttctcgtgggaacaaaacttgatttacgtgacgatgcggacactgtgaacaagctagctgagaaaaagctctccaccattactactacccaaggtttacaaatggcgaaggaactgggggcggttaaataccaagagtgctctgctctgacgcaaaaggggctgaaaaatgttttcgacgaagcgattcgggcggttcttaacccaacaagaagagtcgtccgaacgaagaactgcgaaattctatgattacattgacatgtagagcggcctcgaacgtttacaataatttggaattatgttcctatttaataaatggagttcggtggctttatatattctctcttatcgttttaagcattttaaaatcgtcgctaccgtgt

SEQ ID NO: 194 - protein, 192 aa, Ciona intestinalis
MQAIKCVVVGDGAVGKTCLLISYTTNAFPGEYIPTVFDNYSANVMVDGRPVNLGLWDTAGQEDYDRLRPLSYPQTDVFLICFSVASPASYENVRAKWHPEVAHHCPETPVLLVGTKLDLRDDADTVNKLAEKKLSTITTTQGLQMAKELGAVKYQECSALTQKGLKNVFDEAIRAVLNPTRRVVRTKNCEIL

SEQ ID NO: 195 - DNA, 579 bp, Ciona intestinalis
  CDS (1)..(579)
atgcaggcgatcaagtgtgttgtggttggagatggagctgttggtaaaacctgtttgctgatcagctacacaaccaatgctttccctggagaatatattcccactgtgtttgataactactctgccaatgtcatggtagatggccgccctgtcaacttgggattatgggatacagcagggcaggaggattacgacagacttcggcctctctcctacccacaaacggacgtttttctgatctgtttctcactcgtgtcaccagcctcattcgaaaacgtgcgcgcaaagtggtatccagaagtcgcacaccactgtccagatacaccggtcattctcgtgggaacaaaacttgatttacgtgacgaccaggaaaccatccaaaagctgaaagaaaagaaacttgccccaatcctctacccacaagggttgcagatggcgaaagaagtgaacgccgtaaagtacctggagtgctcggctctcacccaaaaaggcctgaaaaccgttttcgacgaggcgatccgcgccgtcctgtgccctgagcaaaagccgaagaaaaagaagccctgcgagcttttgtga

SEQ ID NO: 196 - protein, 192 aa, Ciona intestinalis
MQAIKCVVVGDGAVGKTCLLISYTTNAFPGEYIPTVFDNYSANVMVDGRPVNLGLWDTAGQEDYDRLRPLSYPQTDVFLICFSLVSPASFENVRAKWYPEVAHHCPDTPVILVGTKLDLRDDQETIQKLKEKKLAPILYPQGLQMAKEVNAVKYLECSALTQKGLKTVFDEAIRAVLCPEQKPKKKKPCELL

SEQ ID NO: 197 - DNA, 727 bp, Ciona intestinalis
  CDS (1)..(582)
atggcttcaattcgtaagaagctggtaatagttggtgatggtgcttgtggtaaaacttgcttactcatcgtgtttagcaaagatcaattcccagaagtttacgtcccaactgtttttgaaaactatgtggctgatattgaagtagactctaaacaggttgagcttgctttgtgggatacagctggtcaagaagattacgacaggcttcgtccactttcctaccccgatactgatgttattcttatgtgtttctcaatcgacagcccagattcacttgagaacattcccgaaaaatggacccctgaggtaaggcatttttgcccaagtgttccaatcattttggttggaaacaaaaaagatcttcgtaacgacagttcaacaataaaggaacttgctaaaatgaaacaatctgccgttagtaacgaagatggaatggcgatggcagagaagattggcgcttacggatatatggaatgttcagcgcgcaccaaagaaggtgttcgggaagtgtttgagcttgcaactaaagcagctttacaaaccaagaaaagaaagaaaaagagtggatgtgaagtcttgtaaagaaattttaactggagtctagcaattgacttaacattggacgcatgctttcatactccccaacaaattaatatttacaatgttggaaacgtattctgcatgacttgaactcaattactcaaatagatggcaggatttatacaca

SEQ ID NO: 198 - protein, 193 aa, Ciona intestinalis
MASIRKKLVIVGDGACGKTCLLIVFSKDQFPEVYVPTVFENYVADIEVDSKQVELALWDTAGQEDYDRLRPLSYPDTDVILMCFSIDSPDSLENIPEKWTPEVRHFCPSVPIILVGNKKDLRNDSSTIKELAKMKQSAVSNEDGMAMAEKIGAYGYMECSARTKEGVREVFELATKAALQTKKRKKKSGCEVL

SEQ ID NO: 199 - DNA, 714 bp, Trichomonas vaginalis
  CDS (11)..(613)
atttcgctagatgaagcatatcaaatgcgttgttgtcggtgatggtgcagtcggtaagacttgccttcttatctcattcactacaaatgctttcccaggtgaatatatcccaacagttttcgataactactctgcaaacgttatggctgaaggacatcctccagtcaacctccagctttgggatacagctggccaggaagactacaagaagcttcgcccactttcttaccctcaaacagatgttttcctcctctgtttctctttagtttatccagcttctctcgagaacatcgagaccatgtggatcaaagaaatcaaggaatactgcccagacaagccatacatccttgtcggtcttaagtccgatcttcgtgatgaattcgatcagcgcgcagatgaactccgcgctaagggttacgagccaatcccacgcgctaagggtgaggaaatggcaaagaagatcaacgcctgctcctacatagaatgctctgcccttaaatcatacaacctcactgaagttttcgatgaagccgtcaagtacgctctcgaaccaccagctcagcagacccagactaaagaaaagacaggtggtggctgctgcgaacttatttaaattttttgcatatatggtaccagagttaaaataaaacatgttgaatgctgtgacaaacaactttataatccgactcggtgtaataataaaagggaattagg

SEQ ID NO: 200 - protein, 200 aa, Trichomonas vaginalis
MKHIKCVVVGDGAVGKTCLLISFTTNAFPGEYIPTVFDNYSANVMAEGHPPVNLQLWDTAGQEDYKKLRPLSYPQTDVFLLCFSLVYPASLENIETMWIKEIKEYCPDKPYILVGLKSDLRDEFDQRADELRAKGYEPIPRAKGEEMAKKINACSYIECSALKSYNLTEVFDEAVKYALEPPAQQTQTKEKTGGGCCELI

SEQ ID NO: 201 - DNA, 600 bp, Colletotrichum trifolii
  CDS (1)..(600)
atggctcaaccaggagtacagtcgctgaagtgtgtggtgacgggtgacggtgctgtcggaaagacatgtttgctgatttcctacacaacgaacgcctttcctggcgagtacattcctactgtcttcgacaactactcggcgagtgtaatggtggacggaaagcctattagcttgggactgtgggatactgccggccaggaagattacgacagactgcgaccgctttcctacccccagaccgacgtcttcctgatttgcttctccatcgtcagccccccatcgtttgacaacgtcaaggccaagtggtaccccgaaatcgatcatcacgcccccaacatccccattatcctcgtcggcaccaagctggatttgagggaggatcccaacaccctcgagtccctccgccaaaagcggatggagcccgtgtcgtacgatcaagccctgatctgcgccaaggaaattaaggcacacaaatacctggagtgttctgccctgacacagaggaatctgaagagcgtttttgacgaggccattcgtgctgtcctgaaccccaggcccgtcgcgcagcagaagaagaagtcgaagtgtacgattttgtga

SEQ ID NO: 202 - protein, 199 aa, Colletotrichum trifolii
MAQPGVQSLKCVVTGDGAVGKTCLLISYTTNAFPGEYIPTVFDNYSASVMVDGKPISLGLWDTAGQEDYDRLRPLSYPQTDVFLICFSIVSPPSFDNVKAKWYPEIDHHAPNIPIILVGTKLDLREDPNTLESLRQKRMEPVSYDQALICAKEIKAHKYLECSALTQRNLKSVFDEAIRAVLNPRPVAQQKKKSKCTIL

SEQ ID NO: 203 - DNA, 618 bp, Brachydanio rerio
  CDS (1)..(618)
atggcaaacggaaccggcagcatcatgttgaaatgcgtggtcgtcggtgacggcgccgttggaaaaacttgtctgttgatgagctatgccaacgacgcctttccagaggaatatgtgcccaccgtctttgatcactatgcagtgagtgtgacggtcggggggaaacagtacctgctggggctctatgacactgcgggtcaggaggactatgatcgcctgcgacccctgtcctatcctatgacggatgtcttcctcatttgcttctccgtggtcaatccggccagcttccagaatgtaagagaggaatgggtccctgagctgcaggaatatgcaccaaacatcccttacctgctcattggcactcagattgacctgcgggatgaccccaagactatcgccaagctcaacgacgtgaaggagaagcccattgtgacggaacaaggccaaaagctagcaaaggagattggtgcctgctgctatgttgaatgctcagcactaacacagaagggcctgaagactgtgtttgatgaggccattatagccattctggctcctaagaaaggcgcactgaagcgaagactaggcccgcgctgcattaactgctgcctcatcacatga

SEQ ID NO: 204 - protein, 205 aa, Brachydanio rerio
MANGTGSIMLKCVVVGDGAVGKTCLLMSYANDAFPEEYVPTVFDHYAVSVTVGGKQYLLGLYDTAGQEDYDRLRPLSYPMTDVFLICFSVVNPASFQNVREEWVPELQEYAPNIPYLLIGTQIDLRDDPKTIAKLNDVKEKPIVTEQGQKLAKEIGACCYVECSALTQKGLKTVFDEAIIAILAPKKGALKRRLGPRCINCCLIT

SEQ ID NO: 205 - DNA, 582 bp, Xenopus laevis
  CDS (1)..(582)
atggcagcgattcggaaaaagctggtgattgttggagatggtgcctgtgggaagacctgcctgctcattgtattcagcaaggatcagttccctgaggtttatgtcccaactgtctttgagaactacattgccgatatagaagtcgatggaaaacaggtggaactggctctgtgggacacagcaggacaggaggattatgacaggctacgcccactttcttaccctgatactgatgtgattttgatgtgtttctcaattgacagccctgacagtttagagaatattcctgagaaatggactccagaagtgaagcatttctgtcccaatgtacccattattcttgtcggtaacaaaaaggatctaagaaatgatgaacacactagaagagagctgacaaagatgaagcaggagccagttaaaccagaagatggcagagaaatggccaacagaatcaatgcatttggctacctggaatgttctgctaagacaaaggatggcgtgagagaagtttttgaaatggctacacgggctgccttgcaagttaggaaacacagaaagaagcaacgttgttctattctataa

SEQ ID NO: 206 - protein, 193 aa, Xenopus laevis
MAAIRKKLVIVGDGACGKTCLLIVFSKDQFPEVYVPTVFENYIADIEVDGKQVELALWDTAGQEDYDRLRPLSYPDTDVILMCFSIDSPDSLENIPEKWTPEVKHFCPNVPIILVGNKKDLRNDEHTRRELTKMKQEPVKPEDGREMANRINAFGYLECSAKTKDGVREVFEMATRAALQVRKHRKKQRCSIL

SEQ ID NO: 207 - DNA, 1092 bp, Xenopus laevis
  CDS (25)..(606)
ggagggagctgcgagtaggaaggcatggcagccataaggaagaagctggtgattgtgggcgacggggcgtgtggcaagacttgtctcctcatcgtctttagcaaagaccagttcccagaggtctatgttcccaccgtctttgagaactacgtggccgacatcgaggtggactccaagcaggtagaactggctctgtgggacacggctgggcaagaggattacgaccgactgagacccctctcctaccctgacacagacgtcatcctcatgtgtttctccatcgacagccccgacagtttggaaaatatccctgagaaatggaccccagaagtgaaacatttctgccccaatgtgccaataatcctggtgggaaacaagaaggatctgcggaatgacgagcacacgcgccgggagttggccaaaatgaagcaggagccagtaagagcagaggagggaagggacatggccaatcgaatcagcgcctttggctacttggagtgctctgccaagaccaaggatggcgtaagagaagtgtttgagatggcgactcgggcggctctgcaggccaaacgtgggcgcaagaggagcacctgccagttactgtgaggagagaagccccatgccctcattctcccccttccctgtgccctctctctccgctgtgggctaggggagctgcggactgaggagacgcaccaataaccaatccctttcctgttctcatgggcagcgccaggccccgagtccagcaaatcacatcagtgccaggtctgtagcaacagggggtttcttacaacagtgccattgtctagtgcagggccccttcctctaaaaggcgggggggggattatttggctttagaaggccccgctgtcctgggggtcggattgtacacacgagagcgggacccctcgtgatattggttaattccaccccgaccctgtgctggcgagggttaatcctgcagctcatgagaggggtggggaggttttataataatgttgtccctgcttgaatgacattttattgtccattgtactcgagtatcaaccaataaactttgtagccatgtttagtaaaaaaaaaaaaaaa

SEQ ID NO: 208 - protein, 193 aa, Xenopus laevis
MAAIRKKLVIVGDGACGKTCLLIVFSKDQFPEVYVPTVFENYVADIEVDSKQVELALWDTAGQEDYDRLRPLSYPDTDVILMCFSIDSPDSLENIPEKWTPEVKHFCPNVPIILVGNKKDLRNDEHTRRELAKMKQEPVRAEEGRDMANRISAFGYLECSAKTKDGVREVFEMATRAALQAKRGRKRSTCQLL

SEQ ID NO: 209 - DNA, 582 bp, Brachydanio rerio
  CDS (1)..(582)
atggcagcaattcgcaagaagctggtgattgtaggagatggagcatgcgggaaaacatgtttgcttattgtgttcagtaaagaccagtttcctgaagtctacgtaccaacagtgtttgaaaactatgttgccgacattgaagttgacagcaaacaggtggaactcgctctgtgggatactgcagggcaggaggactacgacaggcttcgtcctctttcatacccagacaccgatgtcattcttatgtgtttctctattgacagtcctgacagtttagagaatattccggagaagtggacgcctgaggtcaaacacttttgtccaaacgctccaatcatccttgtgggaaacaaaaaagacctgcgcaatgatgaacacacacgcagggaactgaccaagatgaagcaggagccagttaaagcagaggaagggagagacatggccaatcgaattggagcatttggttatatggaatgttctgccaaaacaaaagacggtgttcgggaggtgtttgaaatggccactagagcggcgctgcaggcacgcaggggaaagaagagcaacaaatgctgtctgctgtga

SEQ ID NO: 210 - protein, 193 aa, Brachydanio rerio
MAAIRKKLVIVGDGACGKTCLLIVFSKDQFPEVYVPTVFENYVADIEVDSKQVELALWDTAGQEDYDRLRPLSYPDTDVILMCFSIDSPDSLENIPEKWTPEVKHFCPNAPIILVGNKKDLRNDEHTRRELTKMKQEPVKAEEGRDMANRIGAFGYMECSAKTKDGVREVFEMATRAALQARRGKKSNKCCLL

SEQ ID NO: 211 - DNA, 576 bp, Brachydanio rerio
  CDS (1)..(576)
atgcagagcatcaagtgtgtggtggtgggagacggagcggtgggaaaaacctgcctgctcatctcctacacgaccggcgccttccccaaagagtacattcccaccgtcttcgacaactacagctcccaggtcagcgtggacaaccgtaccgtcagcctcaatctgtgggacaccgcgggtcaggaggagtacgaccgccttcgcacgctgtcctatcctcaaaccaacgtcttcatcatctgcttctccatctccagccctccgtcctacgagaacatcaagcataagtggcacccggaggtgacacaccactgtcctagcgtgcccatcctgcttgtgggaaccaagagtgatctccgcaatgacgccgacgtgctgaagaagctgaaggagcagaaccaggcgcccatcacgacccagcagggtcaagcgctggctcgccaaatccacgccgtcaagtaccgtgagtgttcggcactcagtcaggacggcatcaaggacgtgtttgcagacgcagtgcgtgcctaccttagtcctcaacccgtggctaacaagaagccctgtatactcctctga

SEQ ID NO: 212 - protein, 191 aa, Brachydanio rerio
MQSIKCVVVGDGAVGKTCLLISYTTGAFPKEYIPTVFDNYSSQVSVDNRTVSLNLWDTAGQEEYDRLRTLSYPQTNVFIICFSISSPPSYENIKHKWHPEVTHHCPSVPILLVGTKSDLRNDADVLKKLKEQNQAPITTQQGQALARQIHAVKYRECSALSQDGIKDVFADAVRAYLSPQPVANKKPCILL

SEQ ID NO: 213 - DNA, 576 bp, Brachydanio rerio
  CDS (1)..(576)
atgcagaccataaagtgtgttgttgttggtgatggtgcagtgggaaagacctgtctgttgatctcctacaccaccaatgccttcccagacgagtacattcctacagtgttcgacaactacagcactcaaacctgtgtggacggccgtgctgtcagcctcaacctgtgggacaccgccggtcaggaggagtacgaccgcctgcgaaccctctcctacccgcagacacacgtcttcatcatctgtttctctgtggctagtccttcctctcacgccaacgtcaggcataaatggcacccggaggtctgccaccactgtcctggcgtacctgtgctgctggtgggcaccaagagagacctgcgaggggacaaggagaccctggagaagctgaaggagcaggggatgagtccgaccactccacagcaaggcagtgcactggcccgcagcatcggggcggtgcgatatctggagtgctcggcccttctccaggagggcgtccgagaggtcttcaacgaagcagttagggctgttctctaccccaacgccaagaagcacaccaaaaaatgtgtgctgctttaa

SEQ ID NO: 214 - protein, 191 aa, Brachydanio rerio
MQTIKCVVVGDGAVGKTCLLISYTTNAFPDEYIPTVFDNYSTQTCVDGRAVSLNLWDTAGQEEYDRLRTLSYPQTHVFIICFSVASPSSHANVRHKWHPEVCHHCPGVPVLLVGTKRDLRGDKETLEKLKEQGMSPTTPQQGSALARSIGAVRYLECSALLQEGVREVFNEAVRAVLYPNAKKHTKKCVLL

SEQ ID NO: 215 - DNA, 1124 bp, Rattus norvegicus
  CDS (100)..(684)
aggtggtggctcaggataggtgtcctctgcactaataggcctacctgggtgtagtctgacagcctgtggtctgagaagtcccaggtgctttgtacagcaatggctgccatccggaagaaactggtgattgtgggagatggagcttgtggaaaaacatgcttgctcatcgtcttcagcaaggaccagtttcctgatgtttatgtgcccacagtgtttgagaactatgtggctgatatcgaagtggatggaaaacaggtggagttggccctctgggacacagctggtcaagaagattatgatcgcttgaggccactctcctatccggacactgatgtcctcttgatatgtttctccattggcaaccctgatagctttgggaacatcccacacaaatggataccagaagtaaagcatttctgtcccaacgtgcccatcatcctggtcgggagcaagaaggatcttcggaatgacttgaacacaatacaagagttagccaagaggaaacaagagccggtgaaacctgaacaaggccgagatttggcgaacagcattggcgctttcgagtatgtggagtgttctgcaaagaccaaagatggagtgagaaaggtctttgaaaaaagccaccaaggcttgctcttgcaaacgaaccgtgtgaagaaaaagactggctgctttgtcttttgaagtctttgtgcaaacacagccctagtacagttaattttcaagtgctatttacgaatgttattgtgtaattgctagcctttttgtttatttatatatccaagattacaggtcagaagtcatcttgctactaatgtttggaaatcaactgtgattattaatgacattcattctgtctgaccttccagggtcctgactcttctgtaacagaccattctgcatttcacctgaaacccaaggcactaattgaagaacttattatctgtagaaagagagatggtaacttcatcatttagactgtaactactttctgaccaccctaccatccatatatgagctgagaagaaagctgttgagtcaccacttgagtgtttgctccctaacaactttaatcaccatccttattctcttcgaaatgtctctccaggcagctgtggtagagt

SEQ ID NO: 216 - protein, 194 aa, Rattus norvegicus
MAAIRKKLVIVGDGACGKTCLLIVFSKDQFPDVYVPTVFENYVADIEVDGKQVELALWDTAGQEDYDRLRPLSYPDTDVLLICFSIGNPDSFGNIPHKWIPEVKHFCPNVPIILVGSKKDLRNDLNTIQELAKRKQEPVKPEQGRDLANSIGAFEYVECSAKTKDGVRKVFEKSHQGLLLQTNRVKKKTGCFVF

SEQ ID NO: 217 - DNA, 576 bp, Aplysia californica
  CDS (1)..(576)
atgcaaaccataaagtgtgtggttgtgggggatggggcagtcggaaaaacctgccttctcatttcatacaccacaaataaatttccttcagaatatgtgccaacagtgtttgacaactatgcggtgaccgtgatgatcgggggagagccctacaccctgggcctgtttgataccgcgggtcaggaggactacgacaggctacgtccactcagctaccctcagacggacgtcttcctcgtctgcttctccgtggtcaccccgtcctccttcgagaatgtcagggaaaagtgggttccggagatcacacatcactgtcagcgcacgccgttcctgctggtggggacacagattgatctgcgcgacgacacgcccacggtggagaagctggccaagaacaaacagaagcccatcaccgccgaccacggggagcgtctggcccgcgagctcagggcggtcaagtacgtcgagtgctccgccctcaaccagagaggtctgaagaacgtgtttgatgaggctatcctggcagcgctagaacccccagagccacccaagaaaaagaaatgtgtgctcttgtaa

SEQ ID NO: 218 - protein, 191 aa, Aplysia californica
MQTIKCVVVGDGAVGKTCLLISYTTNKFPSEYVPTVFDNYAVTVMIGGEPYTLGLFDTAGQEDYDRLRPLSYPQTDVFLVCFSVVTPSSFENVREKWVPEITHHCQRTPFLLVGTQIDLRDDTPTVEKLAKNKQKPITADHGERLARELRAVKYVECSALNQRGLKNVFDEAILAALEPPEPPKKKKCVLL

SEQ ID NO: 219 - DNA, 579 bp, Aplysia californica
  CDS (1)..(579)
atgcaggctatcaagtgtgtggtagtcggggacggtgctgtgggtaagacatgtcttcttatcagctacactaccaatgccttccccggagaatacattccaactgtctttgacaactactctgcaaatgttatggtagatggcaagccaatcaatcttggactatgggatactgctggacaagaggactatgatcgtctcagacccttgtcatatccgcaaactgatgtctttcttatatgtttttccttgatcagtcctacaagtttcgagaatgttcgagcaaagtggtttcctgaagtgagccatcattgccctcatacccctatcatcttagtgggtaccaagcttgatctgcgtgaagacaaggagacaattgagaaactgagagacaagaagctgtcccctatcacctaccctcaagggctggccatggcaagggagataagtgctgtgaagtatcttgagtgctcagccttaacccaaaaagggctgaagaatgtctttgatgaggctattcgggctgttttgtgccctaagcctaagccaaagaagaagaaaggatgcgaaattttgtga

SEQ ID NO: 220 - protein, 192 aa, Aplysia californica
MQAIKCVVVGDGAVGKTCLLISYTTNAFPGEYIPTVFDNYSANVMVDGKPINLGLWDTAGQEDYDRLRPLSYPQTDVFLICFSLISPTSFENVRAKWFPEVSHHCPHTPIILVGTKLDLREDKETIEKLRDKKLSPITYPQGLAMAREISAVKYLECSALTQKGLKNVFDEAIRAVLCPKPKPKKKKGCEIL

SEQ ID NO: 221 - DNA, 558 bp, Schistosoma japonicum
  CDS (1)..(558)
atgcaagccatcaaatgtgtagttatcggtgatggtgctgtaggaaaaacatgtttgctcattagctacactacaaatgcttttcctggtgagtatgtcccaactgtcttcgataactactctgccaatgtaatggttggtgaaaaacgtgtgaaccttggtttgtgggatacagctggtcaagaagattatgatagattacggccactatcgtatccacagactgacgttttcttggtttgcttttctttgatcagtccttcatcatttgataacgttcgtgctaaatggtatccagaaatacgccacttttctccaaacacacccattattcttgttggaacaaaactggatctccgcaacagttctaccagtcctaaaaacaaccaaccatcaatatcttatgaacaaggtttaattatggcaagagagattggagctcataagtatctagaatgttcagcgttaactcaggatggattaacaggatgttttcgatgcagctatccgggcagtactcatgcctccagctcggaaaaaaaaacataccttatgtga

SEQ ID NO: 222 - protein, 185 aa, Schistosoma japonicum
MQAIKCVVIGDGAVGKTCLLISYTTNAFPGEYVPTVFDNYSANVMVGEKRVNLGLWDTAGQEDYDRLRPLSYPQTDVFLVCFSLISPSSFDNVRAKWYPEIRHFSPNTPIILVGTKLDLRNSSTSPKNNQPSISYEQGLIMAREIGAHKYLECSALTQDGLTGCFRCSYPGSTHASSSEKKTYLM

SEQ ID NO: 223 - DNA, 576 bp, Blumeria graminis
  CDS (1)..(576)
atgtctcttagatgcgttgttgttggcgatggtgccgttggaaaaacttgtcttctcatcagctatacaacaaataaattcccctccgaatatgtccctactgtcttcgataattatgctgttactgttatgattggcgatgagccatatacccttggcctattcgacactgctggtcaagaagattacgatcgcttacggcccctttcataccctcaaactgatgtatttctcgtctgtttctctgttacttcacccgcatcatttgaaaatgttcgcgagaaatggtttcctgaagtccatcatcactgccctggagtcccttgcttaattgttggcacccaaacagatctgagagatgatcttagcgttcgagaaaagttaaacaaacagaaaatgcaaccagttaagagagaagatggagagagaatggctaaggatttgggtgcagttagatatgtggaatgcagcgcgttgacacagtataagttgaaggatgtattcgatgaggctatagtggctgcactagaacctcccgctccaaaaaagaagcatcgaaactgtctaatcctatga

SEQ ID NO: 224 - protein, 191 aa, Blumeria graminis
MSLRCVVVGDGAVGKTCLLISYTTNKFPSEYVPTVFDNYAVTVMIGDEPYTLGLFDTAGQEDYDRLRPLSYPQTDVFLVCFSVTSPASFENVREKWFPEVHHHCPGVPCLIVGTQTDLRDDLSVREKLNKQKMQPVKREDGERMAKDLGAVRYVECSALTQYKLKDVFDEAIVAALEPPAPKKKHRNCLIL

SEQ ID NO: 225 - DNA, 757 bp, Brassica napus; identical to SEQ ID NO: 73
  CDS (164)..(757)

SEQ ID NO: 226 - protein, 197 aa, Brassica napus; identical to SEQ ID NO: 74

SEQ ID NO: 227 - DNA, 1015 bp, Zinnia elegans
  CDS (170)..(763)
ggtttgttcttggggtttggctggaaaaagattcaatttttcggtgtgtttttgggaaaaagatttggtgaaatttgtgggtgttgaagaaagattgttggggattattgggtgtgagtgatttggtggtgatcaggtcttctgggtgtggaagaagatctgaagaaatatgagtgcatcaagatttataaagtgtgttactgttggtgatggggctgttggaaagacttgtttgttgatttcttacaccagtaataccttccctacggattacgtcccaacggtatttgataatttcagtgctaatgtagttgtcaatggaagcacagttaatctaggcttgtgggacactgctggacaggaggactataacagattaagaccgttgagttatcgtggagctgatgttttcattttggcgttctcactcattagcaaggctagctatgagaacgtttccaagaagtggattccagaattgaagcattatgctcctggtgttccaatcgttcttgttgggacgaaactagatctccgagatgataagcagttttttgtagatcaccctggtgcaactcctattaccactgcacagggagaggaattaaagaagacaatcggtgctcctgagtacattgaatgtagttcaaaaacacaattgaatgtgaagcaagttttcgatgctgccattaaagtcgttctggcgcctccaaaggcgaagaaaaagaagggaaaagctcaaaaggcatgctcaatattgtgatgaagaagatgaaaaccagttgttcaacgcttatctcgtcttgaattcaattccatatgttggttgatttgtattttgatctttgagtactcgaaaatcttggtgtactaattctgtatcttggtcaaaaatttgtatttccatgctcgttttctgtttgcgactgttttactactttgttcttctaagttgaaaaatcggtatctatcgttgaatcaatgaattccattctaatgaaaaaaaaaaaaaaaa

SEQ ID NO: 228 - protein, 197 aa, Zinnia elegans
MSASRFIKCVTVGDGAVGKTCLLISYTSNTFPTDYVPTVFDNFSANVVVNGSTVNLGLWDTAGQEDYNRLRPLSYRGADVFILAFSLISKASYENVSKKWIPELKHYAPGVPIVLVGTKLDLRDDKQFFVDHPGATPITTAQGEELKKTIGAPEYIECSSKTQLNVKQVFDAAIKVVLAPPKAKKKKGKAQKACSIL

SEQ ID NO: 229 - DNA, 843 bp, Zinnia elegans
  CDS (114)..(710)
aaacacttgtcccattactactacacttattccttttatcttcctttcccttgcttaacaacaacaaccaaaccacttgtcgatctctttgtatcatattccgatcgaccgaaatggcagcagcagccaccagattcatcaagtgcgtcaccgttggcgacggtgcggtcggaaaaacctgcatgctcatctcctacaccagcaatactttccccaccgattatgtgccgacagtgtttgataacttcagtgcgaatgttgtggtcggagacagcactgtcaatcttggcctttgggatactgccggtcaggaggattataacagactgaggccactgagttatagaggtgcagatgtgtttttattggcattttctctcattagcagacccagttatgaaaacatctccaagaagtggatctcagaactaaggcattatgccccagatgtccccattgtgctggtgggaaccaaattagatttacgtgaagacaaacaatatttgagtgatcatccaaatgttacagccatcacaacttctcagggtgaagaactgaagaaaagtattggtgcagcagtgtacattgagtgtagctccaaaactcaacagaatgtgaaggctgtttttgatgctgcgattagagttgttttacaaccaccaaagctgaagaaaaagcgaagcaagcaacgactatgtgtctatctatagatctgcttctctgtgcaattgcatgtataatgttctatgtataatgtctttctcatttagaactttaaatgatgtaatgaaatccaagtcatcaaatggtttccttgtaaaaaaaaaaaaaaaaaaaaaaaaa

SEQ ID NO: 230 - protein, 198 aa, Zinnia elegans
MAAAATRFIKCVTVGDGAVGKTCMLISYTSNTFPTDYVPTVFDNFSANVVVGDSTVNLGLWDTAGQEDYNRLRPLSYRGADVFLLAFSLISRPSYENISKKWISELRHYAPDVPIVLVGTKLDLREDKQYLSDHPNVTAITTSQGEELKKSIGAAVYIECSSKTQQNVKAVFDAAIRVVLQPPKLKKKRSKQRLCVYL

SEQ ID NO: 231 - DNA, 659 bp, Ciona intestinalis
  CDS (24)..(605)
  MISC_FEATURE (27)..(27): n is a, t, g, or c
  MISC_FEATURE (94)..(94): n is a, t, g, or c
ataaaatttattgaaacacgaagatgncttcaattcgtaagaagctgaaaatagatggcgaaggggcttgtggtaaaacttgcttactcatcgngtttagcaaagatcaattcccagaagtttacgtcccaactgtttttgaaaactatgtggctgatattgaagtagactctaaacaggttgagcttgctttgtgggatacagctggtcaagaagattacgacaggcttcgtccactttcctaccccgatactgatgttattcttatgtgtttctcaatcgacagtccagattcacttgagaacattcccgaaaaatggacccctgaggtaaggcatttttgcccaagtgttccaatyattttggttggaaacaaaaaagatcttcgtaacggcagttcaacaataaaagaacttgctaaaatgaaacaatctgccgttagtaacgaagatggaatggcgatggcagacaagattggcgcttacggatatatggaatgttcagcgcgcaccaaagaaggtgttcgggaagtgtttgagcttgcaactaaagcagctttacaaaccaagaaaagaaagaaaaagagtggatctgaagtcttgtaaagaaattttaactggagtctagcaattgacttaacattggacgcatgctttcat

SEQ ID NO: 232 - protein, 193 aa, Ciona intestinalis
  MISC_FEATURE (2)..(2): Xaa is Ser, Pro, Thr or Ala
  MISC_FEATURE (24)..(24): Xaa is Glu, Val, Ala or Gly
MXSIRKKLKIDGEGACGKTCLLIXFSKDQFPEVYVPTVFENYVADIEVDSKQVELALWDTAGQEDYDRLRPLSYPDTDVILMCFSIDSPDSLENIPEKWTPEVRHFCPSVPIILVGNKKDLRNGSSTIKELAKMKQSAVSNEDGMAMADKIGAYGYMECSARTKEGVREVFELATKAALQTKKRKKKSGSEVL

SEQ ID NO: 233 - DNA, 567 bp, Schistosoma mansoni
  CDS (1)..(567)
atgcaagccatcaaatgtgtggttgtcggtgatggcgctgtcggaaagacctgtttactcattagctacacgacgaatgcctttcctggtgagtacgtcccaaccgttttcgataactattctgccaacgtaatggttgaccgaaaacctgtgaaccttggtttgtgggatacagctggtcaggaggattatgacagactaagaccactctcatatccacaaactgatgtgtttttggtgtgcttctccttagtcagtcgcacatcgttcgagaatgttcgtagtaaatggcatccggagatatccgcatatgttccaagagctcctattattcttgtcggaactaaacgagaccttcgggatagtcctaatggcctaaaatcaacaacgtttccagtcacgtatgcagagggttgcaggatggccagagaaattaaagctgtgaaatacctggaatgctctgctctaactcagtttggattaaaagatgtcttcgacgaagctattcgagcagtactgatgcctgaagggaagaaaaagaaacatagttcatgtgaattaatttaa

SEQ ID NO: 234 - protein, 188 aa, Schistosoma mansoni
MQAIKCVVVGDGAVGKTCLLISYTTNAFPGEYVPTVFDNYSANVMVDRKPVNLGLWDTAGQEDYDRLRPLSYPQTDVFLVCFSLVSRTSFENVRSKWHPEISAYVPRAPIILVGTKRDLRDSPNGLKSTTFPVTYAEGCRMAREIKAVKYLECSALTQFGLKDVFDEAIRAVLMPEGKKKKHSSCELI

SEQ ID NO: 235 - DNA, 600 bp, Penicillium marneffei
  CDS (1)..(600)
atggcgtctgggcctgcgactcaatcgttgaagtgtgtggtgaccggtgatggtgctgtcggcaagacatgtctcctgatatcatacaccaccaatgcctttcccggcgaatacattcccaccgtattcgacaactactccgctagtgtcatggtcgacggcaggcccatcagcctcggactctgggatacagctggtcaagaggattatgaccgtctccgccccttatcctaccctcaaaccgacgtcttcttgatctgcttctctatcgtctctccaccatcctttgacaacgtaaaagccaagtggtttcccgaaatcgagcaccatgcacccggcgtgcccatcattcttgtcggcacaaagcttgatttgagagaagatagagctaccgctgaggcgctgcgagccaaaaagatggagccggtgtcgtatgagcaggcgcttgcagttgcaaaggagattagggcgcataagtatctggagtgttcggccttgacccagaggaatttgaagagcgtgtttgatgaagctattcgggccgtcctcaatcctcgccctcaacccaagaacaaggcaaaacgatgcactattctgtaa

SEQ ID NO: 236 - protein, 199 aa, Penicillium marneffei
MASGPATQSLKCVVTGDGAVGKTCLLISYTTNAFPGEYIPTVFDNYSASVMVDGRPISLGLWDTAGQEDYDRLRPLSYPQTDVFLICFSIVSPPSFDNVKAKWFPEIEHHAPGVPIILVGTKLDLREDRATAEALRAKKMEPVSYEQALAVAKEIRAHKYLECSALTQRNLKSVFDEAIRAVLNPRPQPKNKAKRCTIL

SEQ ID NO: 237 - DNA, 845 bp, Schistosoma japonicum
  CDS (39)..(617)
ccgggcccccccttggactttactggtttgctggagtgatgagtgcaataaggaaaaagctcgttattgttggggatggagcctgtgggaaaacttgtctactaatagtatttagcaaagaccagtttcctgaagtttacgttccgactgtattcgaaaactatgtcgcggatattgaggtagataacaaacaggttgaattggcactttgggatactgctggtcaagaagactatgacagattaagaccactttcttaccccgatacggatgttattttaatgtgctttagcatcgacactccagatagtttggaaaacatacctgagaaatggacaccagaagtccgacatttctgccctgatgtacctattgtcttagttggaaacaaaaaggacttgcgaagtgaaaactcaacaagagatgacggacatagaggaaaacaggaatttgttaaatcggatgagggttatgcaatggccgatcgtattcatgcttactcatatatcgagtgttcagctaagacgaaggaaggagttcgtgaagttttcgagaccgcgactagagctgctttacagtcgaagaaaacgaaaaagaagaagtgtgatctaatttgattctcggttttctccaaatatggttatccggttttaaagacttcttacattccccccttccgatttcgcttcaggatattaaatttcgactttttattaactgcttgtttcttcaacaaacatattttggttttttaaaaagacaatccattccatgataacctttattatccgtttttatcttgatactaaaatctgtcaggcctgttaaaaaaaaaaaaaaaaaaa

SEQ ID NO: 238 - protein, 192 aa, Schistosoma japonicum
MSAIRKKLVIVGDGACGKTCLLIVFSKDQFPEVYVPTVFENYVADIEVDNKQVELALWDTAGQEDYDRLRPLSYPDTDVILMCFSIDTPDSLENIPEKWTPEVRHFCPDVPIVLVGNKKDLRSENSTRDDGHRGKQEFVKSDEGYAMADRIHAYSYIECSAKTKEGVREVFETATRAALQSKKTKKKKCDLI

SEQ ID NO: 239 - DNA, 582 bp, Ustilago maydis
  CDS (1)..(582)
atgcagaccatcaagtgtgtagtcgtcggagacggtgccgtcggaaagacgtgtcttcttatctcgtatacaaccaacgccttcccgggcgaatacatccccacagtgtttgacaactattcggcaaacgtcatggtcgacggtaaacccgtctctctcggtctctgggatactgcgggtcaagaagactacgaccggttaagaccgctctcgtacccgcaaaccgacgtgttcctcgtgtgcttttcactggtgagtccaccttcgttcgaaaacgttcgaaccaagtggtggcccgaagtgtcgcatcacgctcccaacattcccaccatcctcgtgggaaccaagttggatctgcgcgaggatccagaaacgattgccaagctgcgcgatcgcaggatgcagcctatcacgtatgcgcagggcaatcagatggcgagggacattcacgctaccaagtatttggagtgctctgcactcacccagaagggattgaagggcgtatttgatgaagcgatcaggagcgttttggctcctgcaccagtccagagtaagaagaaaaacaactgtttgattctttaa

SEQ ID NO: 240 - protein, 193 aa, Ustilago maydis
MQTIKCVVVGDGAVGKTCLLISYTTNAFPGEYIPTVFDNYSANVMVDGKPVSLGLWDTAGQEDYDRLRPLSYPQTDVFLVCFSLVSPPSFENVRTKWWPEVSHHAPNIPTILVGTKLDLREDPETIAKLRDRRMQPITYAQGNQMARDIHATKYLECSALTQKGLKGVFDEAIRSVLAPAPVQSKKKNNCLIL

SEQ ID NO: 241 - DNA, 1196 bp, Ustilago maydis
  CDS (436)..(1080)
aattgcgatgggatgcaaccgtccacagggtcccctaagcccgtgggttcatgtggtcaacctcgccacggccttgatcaacacccaccaccgcattcgtagattttcaaacaataccggccccatttcatcgccttttggttttggaagtcaggaacaagcagcatcatagcaagtggacgcaccaacgagcccaagttacagccaatggacattcagctttcctccggttcgctcgacggccgaatcctcctcctctctgtcgggaacgggcgcacaaccattgtaggaattgacaccgattgtttcaattgtcccagccagaagtttgcaccgctcagcacctttggcattggtaggaacagaaatcccttttcgtttccatcgcaaacaggaacactgtcttgttgatcatctttgctcccgccgctcagcatggcaccggcagcaatttgtaggaagcttgtaattgtcggcgacggtgcttgcggcaagacgagtttgctttgcgtttttgccattggcgagttcccgcaagagtatgaacccaccattttcgaaaactacgtcgccgagatccgccttgatggcaagcctgtccagctggcgctatgggacaccgcgggtcaggaagaatacgagcgtcttcgtccactctcctactcacaagcacacgtcatcttgatcgcctttgccatcgatacacccgactcgctcgaaaacgtgcaagtcaagtggatggaggaggtacgtcaaatatgcggcccctcagtgcctgtgctcctggtaggctgcaagaaggatcttcgcgaaaatgccatcgctaagggcaagccggttcagggtcactatgtaaagagacaacaggctaaactggtagcagcacagatcggcgctcgatcgtatcacgaatgctcatcactcaacaaccaaggcgtcgacgccgtgttcgaagccgcgacgcgcgcggccatgcttgtgcgcaattccggtgcttcttcaggaggcgccatctcgcagagcaagaccaaggaggcattacacaacgatgctggctcttgcaaatgtatcgtcctctagaaatctctcttgtgcttcgtcttgtcgacccttgtcctaagcctcgctctcgtctgcctttccatcgtacagtcgctctccctgcatttttgtccctccactcctcccatgttcta

SEQ ID NO: 242 - protein, 214 aa, Ustilago maydis
MAPAAICRKLVIVGDGACGKTSLLCVFAIGEFPQEYEPTIFENYVAEIRLDGKPVQLALWDTAGQEEYERLRPLSYSQAHVILIAFAIDTPDSLENVQVKWMEEVRQICGPSVPVLLVGCKKDLRENAIAKGKPVQGHYVKRQQAKLVAAQIGARSYHECSSLNNQGVDAVFEAATRAAMLVRNSGASSGGAISQSKTKEALHNDAGSCKCIVL

SEQ ID NO: 243 - DNA, 576 bp, Ustilago maydis
  CDS (1)..(576)
atgcagaccatcaagtgtgttgttgtcggagatggtgcggtcggtaagacctgcctgttgatttcgtacaccaccaacaagtttccctcggagtatgttccgacagtgtttgacaactacgccgtgactgtcatgattggcgaggatccgtacacactcggattgttcgataccgccggtcaggaggactacgaccgactgcgaccgctttcatacccgcagacggatgtcttcctggtctgcttctcggtcacctcaccagcctcgttcgaaaatgtcaaggaaaagtggttcccggaggtgcatcaccattgccctggtgtgccgtgcctgattgtgggaacccaggtggatttgcgcgacgaccacgccgtcatcgagaagcttgcacgttcaaagcagcgtcctgtgccctttgaggcgggtgagcgtttggcgagagagttgggtgcggtcaagtacgtcgagtgctcggcgctgacgcaaaagggattgaagaacgtcttcgacgaggccatcgtggctgcgctggaaccgcctgtaatccgcaagaagtccaagtgcgccattctctga

SEQ ID NO: 244 - protein, 191 aa, Ustilago maydis
MQTIKCVVVGDGAVGKTCLLISYTTNKFPSEYVPTVFDNYAVTVMIGEDPYTLGLFDTAGQEDYDRLRPLSYPQTDVFLVCFSVTSPASFENVKEKWFPEVHHHCPGVPCLIVGTQVDLRDDHAVIEKLARSKQRPVPFEAGERLARELGAVKYVECSALTQKGLKNVFDEAIVAALEPPVIRKKSKCAIL

SEQ ID NO: 245 - DNA, 633 bp, Encephalitozoon cuniculi
  CDS (1)..(633)
atgaaggagacaaactggataatgaacagtgaaacacaccgatctggaaaagttgtcattgtgggagatggagcctgcggtaaaacatgtctgctcgaggtgtttagaagaaaccagtttcctgaaacatacatcccaaccgttgtcgacaacttcgtgaaggaagtgaaggtcgctgacgacaaatatgtttccttagccttatgggatactgcagggcaagaggattatgatacaatcaggcctctttcatacaaggagacagatcttgtactactgtgctatacaatagaaaacaagaagaaaatcccaaacatctcaagaaaatggctgatggagataaagaactactgcccctcgtcgcaattctttcttatcgggttgaagaaggatataagggatatggatgatccgacaatcgacaagtcgtcaatagtcacggaaagcgagggtcggaagatcgcagataatatcaatgctgcgaggttttttgagtgctctgcccgtaccagagaaaacgtgaaccttgtattcgtggaagccgcaaagtatatatgggacacgaagcaggctgcttctgatgccagatcgtgtggctttttttcgtgcataagatgctgccgttatagatag

SEQ ID NO: 246 - protein, 210 aa, Encephalitozoon cuniculi
MKETNWIMNSETHRSGKVVIVGDGACGKTCLLEVFRRNQFPETYIPTVVDNFVKEVKVADDKYVSLALWDTAGQEDYDTIRPLSYKETDLVLLCYTIENKKKIPNISRKWLMEIKNYCPSSQFFLIGLKKDIRDMDDPTIDKSSIVTESEGRKIADNINAARFFECSARTRENVNLVFVEAAKYIWDTKQAASDARSCGFFSCIRCCRYR

SEQ ID NO: 247 - DNA, 588 bp, Mucor rouxii
  CDS (1)..(588)
atggctgaaatcagacgaaaacttgtgattgttggagatggtgcttgtggtaaaacctgtttgttgattgtcttttcaaagggtacttttcctgagttctatgttcccaccgtttttgaaaattacgtagctgatgtcgaagtcgatggaaaacacgtggaattagctttatgggatacagcaggccaagaagattatgatcgtctccgtcccttgtcttaccctgattctcatgttatcttgatttgttttgctgttgattcacccgattcattggaaaacgttcaagagaagtggatctctgaagtactccacttctgtcaaggtttacctattgttttagttggttgtaagaaagatttaagaaatgatcctggaacaattgaagaacttagaagaaactctcaaaaacctgtcagttcagaagagggtgcttctattgctcaaagaattagtgcttacaagtaccttgaatgttctgccaagactggtgaaggtgtacgtgaagtatttgaacacgcaacaagagctgcattaatggtttctaagaagaaaaagtcaaagagtggtgtctgcaaccttttgtaa

SEQ ID NO: 248 - protein, 195 aa, Mucor rouxii
MAEIRRKLVIVGDGACGKTCLLIVFSKGTFPEFYVPTVFENYVADVEVDGKHVELALWDTAGQEDYDRLRPLSYPDSHVILICFAVDSPDSLENVQEKWISEVLHFCQGLPIVLVGCKKDLRNDPGTIEELRRNSQKPVSSEEGASIAQRISAYKYLECSAKTGEGVREVFEHATRAALMVSKKKKSKSGVCNLL

SEQ ID NO: 249 - DNA, 1014 bp, Neurospora crassa
  CDS (259)..(1014)
atgtcgtcgtcaagcaagttccgcagctcacaccactatcattcgcagtcggtgtcgtcaatcctaggcaggcacgatagcaccagccccggcgcagaactccaacgacgaccgaccaccacctcgtcctacacatcctctggtagcgccagccgacgagtaccacgcgacaacgggacgagatcgagcgatgggacagtgagtaccatgatgagcaccacatcgtcgaccggaagagaatcagcagcaactacggccatgaccgagggcccggcctactccaagaaggtggtggtcgtgggcgatggcggttgcggaaagacatgtctcctgatcagttatagtcagggatacttcccagagaaatatgtcccaaccgtctttgagaactacatcacctacccaacgcatccaccgaccggtaagaccgtcgagctcgccctgtgggataccgccggccaagaggaatacgaccgcttgcgaccgctttcatacccagaaaccgaccttatttttgtctgcttcgccattgactgccccaactccctcgagaatgtcatggacaagtggtaccccgaagtcctccacttctgtccgtatacaccccttatcctcgtcggcctcaagtccgacctccgcaataagaagacgtgcatcgacatgctcaagacacaaggtctcacccccgtcaccaccgaacaaggactcgccgtcgctaagaagatgggcgctcagtacatggagtgctcatcaaaggagatgaagggtgtagaggagatttttgagcaggccatcctcacagtagtcgccaacgacaggaaaacactggaacaggaagccgcgaacggcatgctgggtgttggcgcgggctcgggaagcggaaagggcagcggaatctcgttcagcagtggtgacaaggccggttccgggatagggcccgtcaaggcggccggtgtgggtggcacgattgtcccgaaaacgaggaagaagaagagaaagtgtggtatgatgtga

SEQ ID NO: 250 - protein, 251 aa, Neurospora crassa
MTEGPAYSKKVVVVGDGGCGKTCLLISYSQGYFPEKYVPTVFENYITYPTHPPTGKTVELALWDTAGQEEYDRLRPLSYPETDLIFVCFAIDCPNSLENVMDKWYPEVLHFCPYTPLILVGLKSDLRNKKTCIDMLKTQGLTPVTTEQGLAVAKKMGAQYMECSSKEMKGVEEIFEQAILTVVANDRKTLEQEAANGMLGVGAGSGSGKGSGISFSSGDKAGSGIGPVKAAGVGGTIVPKTRKKKRKCGMM

SEQ ID NO: 251 - DNA, 915 bp, Oryza sativa
  CDS (85)..(678)
gggaccatcactaccaccacttcaccaccaaacccaaccaagaacaagttttcaggggcaaattaagaagagcttggtgacgatatgagcacggcgaggttcatcaagtgcgtcaccgtcggcgacggcgccgtcggcaagacatgcatgctcatctcctacaccagcaacactttccccacggattatgtgccgacggttttcgacaacttcagcgccaacgtggtcgtcgacggcaacacggtgaaccttgggctctgggatactgctggacaagaggattacaataggctgaggcctctcagctacagaggagctgatgtctttttactagcattttccctcatcagcaaagcgagctatgagaatattcacaagaagtggataccagagctgaggcattatgctcctaatgtgccaatcgtattagttggaaccaagcttgacttgcgtgaggacaagcagttcttcctggaccaccctggtctagcacctatttccactgcacagggggaggagctgaagaggatgataggtgctgcggcgtacatcgaatgcagctccaagacgcagcagaatgtgaaatcagtattcgactcggcgatcaaagttgtactttgcccgccaaagccgaagaagaagaacaccaggaagcagaggagttgctggatcctatgagtgataaacagcaagattggcgtattccgcaggaaacctgtattatttttacagtgtgtgttgtgttatgtttgtgtgttgcagattagatgcagtttgggttacaaaatttgctgggtctgaaatattcagctcagtgcttcttgagtactacctctgatgattcttacaaaagtgttctttggttggttcagatatatatattatgattattataaaaaaaaaaaaaaaaaaaaa

SEQ ID NO: 252 - protein, 197 aa, Oryza sativa
MSTARFIKCVTVGDGAVGKTCMLISYTSNTFPTDYVPTVFDNFSANVVVDGNTVNLGLWDTAGQEDYNRLRPLSYRGADVFLLAFSLISKASYENIHKKWIPELRHYAPNVPIVLVGTKLDLREDKQFFLDHPGLAPISTAQGEELKRMIGAAAYIECSSKTQQNVKSVFDSAIKVVLCPPKPKKKNTRKQRSCWIL

SEQ ID NO: 253 - DNA, 1010 bp, Zea mays
  CDS (74)..(718)
cactccgtccctctcctccaggaccgcccgctcttatcccgtttctcccttctctgggctcggagaatcggagatggcgtccagcgcctctcggttcatcaagtgcgtcacggtcggcgacggtgccgtgggcaagacatgtatgctcatctgctacaccagcaacaagttccccactgattacatacccacggtgttcgacaatttcagtgcaaatgtcgttgtggatggcaccacggtgaatttgggcctgtgggataccgcagggcaggaagattacaaccgactgaggcctctaagctaccgtggtgcagatgttttcgtgcttgcattctcacttgtgagtcgagctagctatgagaatatcatgaagaagtggataccggagcttcagcattatgcacgtggggtgcctgttgtgttggtaggcacaaaatttgatcttcgtgaagacaagcactacttgatggaccatcctgggttggtgcctgttaccacagcacaaggggaggaacttcgtagacaaattggtgctatgtattacatcgaatgcagttcgaagacacagcagaatgtcaaagctgtgttcgatgctgccatcaaggttgtaatccagcctccaactaaactaagagaaaagaagaaaaagaaatcacgcaagggatgttcgatggtgaacatcttatctggaagaaaaatgctatgcttcaagtcctgaatgatcgaagggggtcttacctgaactaataccatgagtgtgaccccaagttcgcgaagcttgaaatcttgatgcgctcgttgcgcatgtatatttgcacctttggttattaatcactagaggtagatgattgaaactaatctgcttaaccaatgtgcactgctgggcgctggcgtggttagctatatcagttaggcagttcgacagaggtcaaagagattgagattttgttctttcttggcaatgtcacagcttttgtgaaaaaaaaaaaaaaaaaaaaaaaaaaaaaaaa

SEQ ID NO: 254 - protein, 214 aa, Zea mays
MASSASRFIKCVTVGDGAVGKTCMLICYTSNKFPTDYIPTVFDNFSANVVVDGTTVNLGLWDTAGQEDYNRLRPLSYRGADVFVLAFSLVSRASYENIMKKWIPELQHYARGVPVVLVGTKFDLREDKHYLMDHPGLVPVTTAQGEELRRQIGAMYYIECSSKTQQNVKAVFDAAIKVVIQPPTKLREKKKKKSRKGCSMVNILSGRKMLCFKS

SEQ ID NO: 255 - DNA, 579 bp, Schizophyllum commune
  CDS (1)..(579)
atgcagaccatcaagtgtgtagttgttggagacggtgcggttggaaagacgtgcctgttgatctcctatacgaccaacaagttcccgagcgagtatgtgcccaccgtcttcgacaattatgccgtgaccgtcatgatcggcgaggacccctatacactgggtctgtttgatactgctggccaggaggattacgatcgactccggccgttgtcgtacccgcagacggacgtgtttcttgtgtgctttagtgtaacatctccagcctccttcgagaacgtaaaggagaaatggttcccggaggttcgccaccactgtccgggcgtgccctgcctcatcgtcggcacgcaaatcgacttgagggacgactcgcaggtgatcgagaagctggcgcggcaaaagcagagaccggtcacgagcgaccaaggcgagcggctcgttcgggaacttggcgcggtcaagtacgtcgagtgctcagcactcacgcagaagggattgaagaacgtgtttgatgaggccatcgtcgccgcgctggagccacccgtggtgaagaagaaggggccgaaatgtgtcatcctttga

SEQ ID NO: 256 - protein, 192 aa, Schizophyllum commune
MQTIKCVVVGDGAVGKTCLLISYTTNKFPSEYVPTVFDNYAVTVMIGEDPYTLGLFDTAGQEDYDRLRPLSYPQTDVFLVCFSVTSPASFENVKEKWFPEVRHHCPGVPCLIVGTQIDLRDDSQVIEKLARQKQRPVTSDQGERLVRELGAVKYVECSALTQKGLKNVFDEAIVAALEPPVVKKKGPKCVIL

SEQ ID NO: 257 - DNA, 1075 bp, Aspergillus fumigatus
  CDS (197)..(793)
ttaacctccaaaagatatacccttaaagattattatcgccccatccgccttcacttgacgctaaacccccccaagaattcacttcgacgctaattgatcgctatcatttgggttcatctttacaagctgttcatcatcaaatcctctctgtgattttcttctctgtgcatatattcttaattccaacaacaaaaacatggcgtccggccccgctactcagtcattaaagtgtgtggtgacaggtgatggtgcagttggaaagacatgcctcctcatctcgtataccaccaatgcattccccggagaatacatccctaccgtatttgacaactatacggctagtgtgatggtagatggtaggcccatcagcttgggactgtgggatactgctgggcaagaagattatgaccgactgagaccgctgtcctaccctcaaaccgacgtcttcctcatctgcttctccattgtcagccctccttcgtttgacaacgtcaaggcaaagtggtacccggagattgagcaccatgcccccaatgttcccatcatccttgttggtaccaaactcgatctgagagacgatcccgcgacagcagaatccctccggcagaaaaagatggacctgtctcgtacgagacactggccgtcgccaaaagagatccgagcgcacaagtatctcgaatgttctgccctcaggcagcgcaacttcaaaagcgtctttgatgaagccattcgtgctgtcctcaaccctggacctgccgcaaaaccgaagagcaagaaatgcaccatactgtagaccattactttcagcttttcatcatctaatcataaacaactaattcggcgtctgggatagttgaaggttttgcaatgatccccttgatgattgttccaactgtgttcatatttctttctctctttctcggtcacatgtcatgatcctgatgagcttctttctgggtcaggacacccctttcctcatcttgtcgtctttttgtgcacatgcagcataaacttgtaacatgctacgccataacaggaagctgtcacttaatcgatttaacctccattgtcctaa

SEQ ID NO: 258 - protein, 198 aa, Aspergillus fumigatus
MASGPATQSLKCVVTGDGAVGKTCLLISYTTNAFPGEYIPTVFDNYTASVMVDGRPISLGLWDTAGQEDYDRLRPLSYPQTDVFLICFSIVSPPSFDNVKAKWYPEIEHHAPNVPIILVGTKLDLRDDPATAESLRQKKMDLSRTRHWPSPKEIRAHKYLECSALRQRNFKSVFDEAIRAVLNPGPAAKPKSKKCTIL

SEQ ID NO: 259 - DNA, 594 bp, Aspergillus fumigatus
  CDS (1)..(594)
atggagctgtgcgggcgccagaaagttgtccagcgcaagatggtactcttaggagatggtgcttgcggcaagacgtcagctttgaatgtgtttacaagagggttcttcccgacagtctatgagccgactgtttttgaaaactatgtccatgacattttcgtcgataacgtacacatggagttgtcgctgtgggatacagccggtcaagaagaattcgatcgattacgagcactgtcctacgaggatacacatgttattatgctatgtttcagcgtcgatagccctgactcgttcgaaaatgtggcgacgaaatggattgatgagattcgcgagaattgccccggcgtgaagttagtcctcacggcactcaaatgcgatctgcgaaaagacgacgagttgaacgacaacccgaacgccatcacgttcgaacaaggattagcgaaagcaaaggaaatcggcgctgtaaaataccttgaatgctctgctgttcagaatcgcggtatcagggagaccttttatgaagccgccaaggtcgctcttgatgtgaagcctgcaggatccagcgggtccaagggacagtgcattatcctctga

SEQ ID NO: 260 - protein, 197 aa, Aspergillus fumigatus
MELCGRQKVVQRKMVLLGDGACGKTSALNVFTRGFFPTVYEPTVFENYVHDIFVDNVHMELSLWDTAGQEEFDRLRALSYEDTHVIMLCFSVDSPDSFENVATKWIDEIRENCPGVKLVLTALKCDLRKDDELNDNPNAITFEQGLAKAKEIGAVKYLECSAVQNRGIRETFYEAAKVALDVKPAGSSGSKGQCIIL

SEQ ID NO: 261 - DNA, 582 bp, Mus musculus
  CDS (1)..(582)
atggctgccatccggaagaaactggtgatcgtgggagatggagcttgtggaaaaacatgtttgctcatcgtcttcagcaaggaccagtttcctgaggtttacgtgcccacagtatttgagaactatgtggctgatatcgaagtggatggaaaacaggtggagttggccctgtgggatacagctggacaagaagattatgatcgcctgaggccactctcctatcccgacactgatgttctcttgttatgtttctccattggcaaccctgatagctttgggaacatcccacataaatggattccagaagtcaagcatttctgtcccaacgtgcccatcatcctggttgggagtaagaaggatcttcggaatgacttctacacgatacaagagttagccaagaggaagcaagcgcctgtgagacctgaacaaggccaagggttggcgaacagcattggcgctttcgagtatgtggagtgttcagcgaagaccaaagatggagtgaggagggtctttgaaaaggccacaagggctgctctgcaaacgaatcgagtgaagaaaaagactggttgctttgtcttttga

SEQ ID NO: 262 - protein, 193 aa, Mus musculus
MAAIRKKLVIVGDGACGKTCLLIVFSKDQFPEVYVPTVFENYVADIEVDGKQVELALWDTAGQEDYDRLRPLSYPDTDVLLLCFSIGNPDSFGNIPHKWIPEVKHFCPNVPIILVGSKKDLRNDFYTIQELAKRKQAPVRPEQGQGLANSIGAFEYVECSAKTKDGVRRVFEKATRAALQTNRVKKKTGCFVF

SEQ ID NO: 263 - DNA, 576 bp, Mus musculus
  CDS (1)..(576)
atgctgagctcaatcaagtgcgtgctggtaggggacagtgctgtggggaaaacctcactgttggtgcgcttcacctctgagaccttcccggaggcctacaaacccacggtgtacgagaatacgggtgtagacgtcttcatggatggcatccagatcagcctgggtctctgggacactgccggcaacgacgccttcagaagtatccggcccctgtcctaccagcaggcagacgtggtactgatgtgctactctgtggccaaccataactcgttcctgaacttgaagaacaaatggattagtgagatcaggagcaacctaccctgtaccccggtgctggttgtggccacacagacggaccagagagaggtgggacctcacagggcttcctgcatcaatgccatagaagggaagagacttgcccaggatgtgagagccaagggctacctggagtgctcagccctcagcaaccggggagtacagcaggtatttgaatgtgctgtccgaacagctgtcaaccaggccaggaggcgaaacagaaggaagctgttctccatcaatgaatgcaagatcttctaa

SEQ ID NO: 264 - protein, 191 aa, Mus musculus
MLSSIKCVLVGDSAVGKTSLLVRFTSETFPEAYKPTVYENTGVDVFMDGIQISLGLWDTAGNDAFRSIRPLSYQQADVVLMCYSVANHNSFLNLKNKWISEIRSNLPCTPVLVVATQTDQREVGPHRASCINAIEGKRLAQDVRAKGYLECSALSNRGVQQVFECAVRTAVNQARRRNRRKLFSINECKIF

SEQ ID NO: 265 - DNA, 786 bp, Mus musculus
  CDS (1)..(786)
atggccccgcagcaaggccggccggcgctgcccgcccgctgcgagccgccggcggcgccgccggtaccgcctcgccgagagcgcggggggcgcggggcgcgcgggcccggggtgtccgggggtcgggggcgcgcgggcggcgccgagggacgcggcgtcaagtgcgtgctggtcggcgacggcgcggtgggcaagaccagcctggtggtcagctacaccactaacggctaccccaccgagtacatccctacggccttcgacaacttctcggccgtggtgtctgtagatgggcggcctgtgagactccagctctgtgacactgcaggacaggatgagtttgacaagctgaggcccctctgctacaccaacacagacatcttcctgctgtgcttcagcgtggtgagccccacatccttccagaacgtgggcgagaagtgggttccagagattcgacgtcactgcccaaaggcccccatcatcctggtcgggacacagtcggacctcagggaggacgtcaaagtgctcatagaactggacaagtgcaaagagaagccggtgcctgaagaggcggcgaagctgtgcgcggaggaagtcaaagctgtctcctacatcgagtgctcagcgttgactcagaaaaacctcaaagaggttttcgacgccgccattgttgctggtatccagcactcagactcccagctacagccaaagaagtctaaaagcaggaccccggataaggtgcgggacctgtccaagtcttggtggaggaagtattgctgcctggcctga

SEQ ID NO: 266 - protein, 261 aa, Mus musculus
MAPQQGRPALPARCEPPAAPPVPPRRERGGRGARGPGVSGGRGRAGGAEGRGVKCVLVGDGAVGKTSLVVSYTTNGYPTEYIPTAFDNFSAVVSVDGRPVRLQLCDTAGQDEFDKLRPLCYTNTDIFLLCFSVVSPTSFQNVGEKWVPEIRRHCPKAPIILVGTQSDLREDVKVLIELDKCKEKPVPEEAAKLCAEEVKAVSYIECSALTQKNLKEVFDAAIVAGIQHSDSQLQPKKSKSRTPDKVRDLSKSWWRKYCCLA

SEQ ID NO: 267 - DNA, 624 bp, Trichoderma reesei
  CDS (1)..(624)
atgcctctctgcggcggctccaagacggtgcagcgcaagctggttcttctgggcgatggtgccagcggaaagacgtcgctgctcaacgtcttcacaagaggttactttcccaccgtctacgaacctaccgtctttgaaaattacgtccacgacatctttgtcgacaacgtccacatcgagctctccctctgggatacggcgggacaggaggaattcgatcggctgcgatcgctctcctacgatgacaccgatttgatcgtgctctgttactcggtcgatagcaaagactcgctagaaaacgtcgaatccaaatgggtcggagagattgccgacaactgccccggcgtcaagctggtcctcgtcgccctcaagtgcgacctgcgccagcaagaggacgacgagcccgaggaccaggcagcggccgacggcaacgcacagcgcgagaaaccgcccacgatttcctacgacgagggccttgaggtcgccaagcggataggcgcctcgcgctacctggagtgctcggcgatgaagaaccgcggcgtcaacgaggcctttaccgaggcggcccgcgtagcgctaagcgtcaagaaggagagggaagacaacaagtgcacaatcatgtaa

SEQ ID NO: 268 - protein, 207 aa, Trichoderma reesei
MPLCGGSKTVQRKLVLLGDGASGKTSLLNVFTRGYFPTVYEPTVFENYVHDIFVDNVHIELSLWDTAGQEEFDRLRSLSYDDTDLIVLCYSVDSKDSLENVESKWVGEIADNCPGVKLVLVALKCDLRQQEDDEPEDQAAADGNAQREKPPTISYDEGLEVAKRIGASRYLECSAMKNRGVNEAFTEAARVALSVKKEREDNKCTIM

SEQ ID NO: 269 - DNA, 675 bp, Ashbya gossypii
  CDS (1)..(675)
atgcctctgtgtgggtcgagctcgtcgtcgaagcatcctatcgagcgcaagatcgtcatcctcggagacggtgcttgcgggaagacgtcgctgttgaacgtgttcacgcgagggtactttccgaaggtgtacgagcccacggtattcgaaaactacatccatgacatcttcgtggacaaccagcacatcacgctgagcctgtgggacactgctgggcaggaggagtttgaccggttgcgatcgctgtcgtactcggacacacacacgattatgctgtgtttctcggtggactcgcgggactcgctggagaacgtcaagaacaagtgggtgagcgaaattgcggaccactgcgagggcgtgaagctggtgctagtggcgctgaagtgcgacttgcgcagcagcgacgagtacggcaacgagagcgccatcacgccggggtccatccagaaccagaagtacaacggcggcggcggcaacgggctgatcccctacgacgaggggctggcgatggccaagcagattggggcgctgcgctatctggagtgcagcgccaagatgaaccgtggcgtgaacgaggcgttcaccgaggctgcgcgctgcgcgctgactgcgacaccgaagggggcccgggactctgcgcccgaggccgaaagcagcagttgtactatcatgtga

SEQ ID NO: 270 - protein, 224 aa, Ashbya gossypii
MPLCGSSSSSKHPIERKIVILGDGACGKTSLLNVFTRGYFPKVYEPTVFENYIHDIFVDNQHITLSLWDTAGQEEFDRLRSLSYSDTHTIMLCFSVDSRDSLENVKNKWVSEIADHCEGVKLVLVALKCDLRSSDEYGNESAITPGSIQNQKYNGGGGNGLIPYDEGLAMAKQIGALRYLECSAKMNRGVNEAFTEAARCALTATPKGARDSAPEAESSSCTIM

SEQ ID NO: 271 - DNA, 624 bp, Ashbya gossypii
  CDS (1)..(624)
atgtctcagcaaatgcataaccccagtatcaggagaaaattggtgatcgtcggagatggtgcatgcgggaaaacatgtcttttgattgtgtttgccaagggaaagttcccacaggtgtatgttcctacggttttcgacaactacgttgcagatgtggaggtagacggcagacgggtggagcttgcgctttgggatacggctgggcaggaggattacgacaggctacggccgttatcgtacccagactccaatgttgtgttgatctgctactcgattgacctaccagactcgttggagaacgtgatggagaagtggatcagcgaggtgctatacttctgccagggtgttccgatcatcttggtggggtgcaaggctgacttgcggaacgatccgcaagtgatcgagcagttgagacagcagggacagcagcctgtctcgcaggctcaggcgcaggaggtagcggaccagatcggcgcggtagagtacattgagtgctctgcaaagaccggctttggtgtgcgcgaggtgtttgaggcggccacgcgtgcttccttgatggggaaacaaggcaagtctaaggcgaagtctgacaagaagaagaagaaaaagtgtgtggtcttgtag

SEQ ID NO: 272 - protein, 207 aa, Ashbya gossypii
MSQQMHNPSIRRKLVIVGDGACGKTCLLIVFAKGKFPQVYVPTVFDNYVADVEVDGRRVELALWDTAGQEDYDRLRPLSYPDSNVVLICYSIDLPDSLENVMEKWISEVLYFCQGVPIILVGCKADLRNDPQVIEQLRQQGQQPVSQAQAQEVADQIGAVEYIECSAKTGFGVREVFEAATRASLMGKQGKSKAKSDKKKKKKCVVL

SEQ ID NO: 273 - DNA, 615 bp, Yarrowia lipolytica
  CDS (1)..(615)
atgccccaaccaacggatctgcgaagaaaactcgtcattgtcggcgacggagcctgcggcaagacctgtctgctgattgtcttcgcgaagggcaccttcccggaggtgtacgtgcccaccgtgtttgagaactacgtggccgacgtggagattgacggccgacgagtggagctggccctgtgggataccgccggccaggaggattacgaccgactgcgacccctgtcctaccccgacgccaacgtcatcatcatctgcttcgccatcgacagccccgactcgctcgacaacgtgcaggagaagtggatctccgaggtgctgcacttttgccagggcgtgcctattctgctggtcggttgcaaggtcgacctgcgaaacgaccccaagaccatcgaggagctgagaagaacgtcccagcgacccgtcacgaccgaggagggaaatgccgtggcccagaagattggcgccggcaagtacctggagtgctctgcccgaacccacgacggagtgagagaggtcttcgagcatgccacccgagctgccctgactgcccacggccagaagggctccaagagctccagcagagagggcaagaaaaagtgtttgattttgtaa

SEQ ID NO: 274 - protein, 204 aa, Yarrowia lipolytica
MPQPTDLRRKLVIVGDGACGKTCLLIVFAKGTFPEVYVPTVFENYVADVEIDGRRVELALWDTAGQEDYDRLRPLSYPDANVIIICFAIDSPDSLDNVQEKWISEVLHFCQGVPILLVGCKVDLRNDPKTIEELRRTSQRPVTTEEGNAVAQKIGAGKYLECSARTHDGVREVFEHATRAALTAHGQKGSKSSSREGKKKCLIL

SEQ ID NO: 275 - DNA, 915 bp, Zea mays
  CDS (10)..(657)
gtcttggccatggcctccagcgcctcccggttcatcaagtgcgtcacagtgggggacggcgccgtgggaaagacctgcatgctcatctgctacaccagcaacaagttccccactgattacatacccactgtcttcgataacttcagtgcaaacgtggtagtcgacggtaccacggtgaatttgggcctttgggatactgcagggcaggaagattacaacagactgaggccactgagctaccgcggagcagatgtgttcgtgctcgccttctcgcttgtcagccgagctagctacgagaatgttatgaagaagtggctaccggagcttcagcattatgcaccgggtgtccccatagtgttggccggaactaaattggatcttcgtgaagacaggcactacttagttgaccatcctggtgcggtacctgttactacagcacagggggaggaactgcgcaagcacattggcgcaacttgctacatcgaatgcagctcaaaaactcagcagaatgtgaaagctgtgtttgatgctgccatcaaggtagtaatcaggcctccgacgaagcagcgagaaaggaagaaaaagaaagaacggcgaggatgctcaatattctgcagccgtatcatgcacgcaagaagactaggatgcttcaagtgatagaaggccttcttcgacgataacgtaggcttctaagatgaatcgagatcgtgtatagtttgtctccatgttccaaagtgctcgttgcgcttgtgcacttgggctggtaatgtgtatatttagtctttgccaattgatatttaggagaaatattaagcacttcgtttatgtaccattggctcataatgagctgggaagtccaatacatactaagaagtaacaatattttcttccgatgattttattatggtttctcgt

SEQ ID NO: 276 - protein, 215 aa, Zea mays
MASSASRFIKCVTVGDGAVGKTCMLICYTSNKFPTDYIPTVFDNFSANVVVDGTTVNLGLWDTAGQEDYNRLRPLSYRGADVFVLAFSLVSRASYENVMKKWLPELQHYAPGVPIVLAGTKLDLREDRHYLVDHPGAVPVTTAQGEELRKHIGATCYIECSSKTQQNVKAVFDAAIKVVIRPPTKQRERKKKKERRGCSIFCSRIMHARRLGCFK

SEQ ID NO: 277 - DNA, 1002 bp, Zea mays
  CDS (149)..(787)
agaagataagcaaagcaaggcaaccgttgtcgttgtctctgttcctccgcttcctgctctcttggcttgctgcttgccctcggagcagtgccttccgccgccgccgccgccgcctgttgtgagaaggagaggccggggctgggaggagatgagcgtgaccaagttcatcaagtgcgtcacggtgggggacggcgcggtgggcaagacctgcatgctcatctgctacaccagcaacaagttccccacggattacatccccacggtgttcgacaacttcagcgccaacgtctccgtggacggcagcatcgtcaacctgggcctctgggacactgcaggacaagaggactacagcagattgcggccactgagctacaggggcgcggacgtgttcgtgctggccttctccttgatcagcagggcgagctatgagaacgtccttaagaagtgggtgccagagcttcgcagattcgcgcccgacgtcccggtcgttcttgtcgggaccaagttagatctccgtgaccacagggcctaccttgctgaccatcctggagcgtcgacgatcacgacggcacagggcgaagaactgaggaggcagatcggcgctgcggcttacatcgagtgcagttccaaaacgcagcagaatgtcaagtcggtcttcgacacagccatcaaagtggtccttcagcccccgcggaggagggaggcgacgcctgccaggaggaagaacaggcgtggctccgggtgctctatcatgaacctcatgtgtggcagcacgtgcgctgcttaggagtctagaacactgatctggaaggaggtgaaggtgaaggcatggtgtctatgtgctatggcgactggcaagttaatggggccgcatggatgactgctgctcttgtttttttaagctcgtctgccgtatgctttgtttttttaggcttcaaggactgacaattgcaagaatgcagtgtttatgtaagaggttgtttgctggaataggattgctgt

SEQ ID NO: 278 - protein, 212 aa, Zea mays
MSVTKFIKCVTVGDGAVGKTCMLICYTSNKFPTDYIPTVFDNFSANVSVDGSIVNLGLWDTAGQEDYSRLRPLSYRGADVFVLAFSLISRASYENVLKKWVPELRRFAPDVPVVLVGTKLDLRDHRAYLADHPGASTITTAQGEELRRQIGAAAYIECSSKTQQNVKSVFDTAIKVVLQPPRRREATPARRKNRRGSGCSIMNLMCGSTCAA

SEQ ID NO: 279 - DNA, 850 bp, Oryza sativa
  CDS (112)..(705)
agcaagcagcagctgaggtgaggtccgtggcgttggagtgaggactgaggaggaagaagagggcgggatctagggtaccggatgcgctggctgtgctgagtgagagtagagatgagcgcgtctcggttcatcaagtgcgtcaccgtgggggacggcgccgtgggcaagacctgcatgctcatctcctacacctccaacaccttccccacggactatgttccaactgtttttgataacttcagtgcaaatgttgtggtcgatgggagcactgtgaacttggggttgtgggatacagcaggacaagaggactacaataggctacgcccgttgagctatcgtggcgctgatgttttcctgctggccttttctctgatcagcaaagcaagctatgagaatgtttctaaaaagtggatacctgaattaaggcattatgctcctggtgtgccaataattctcgttggaacaaagcttgatctgcgggatgataagcaatttttcgtagatcaccctggtgctgtacctatttccactgctcagggcgaagagctgaggaaactcattggtgcagcggcatacattgaatgcagttcaaaaacacagcaaaacatcaaggcagttttcgatgctgcgattaaggtggttctccagcctccaaagcaaaagaagaagaagaaaaaggcgcagaaaggatgtgccatcttgtaattaaatggtagacagtgcagtgcagatcgatgtatcccttcatttgtagcctctggcttcaatcgtcgcttgtttgtataattacgctagatgccaccggcagaagatataatatagtcctcctgcctttgtggtgttggtctct

SEQ ID NO: 280 - protein, 197 aa, Oryza sativa
MSASRFIKCVTVGDGAVGKTCMLISYTSNTFPTDYVPTVFDNFSANVVVDGSTVNLGLWDTAGQEDYNRLRPLSYRGADVFLLAFSLISKASYENVSKKWIPELRHYAPGVPIILVGTKLDLRDDKQFFVDHPGAVPISTAQGEELRKLIGAAAYIECSSKTQQNIKAVFDAAIKVVLQPPKQKKKKKKAQKGCAIL

SEQ ID NO: 281 - DNA, 800 bp, Suillus bovinus
  CDS (123)..(707)
ccgtcacgttgccttctaccatctttcaaagttaaaggttattcaagcactcgctgattctgcgcacacattgctctccttgagggcttctctttcaggcaaccaagtaggattcaatcagaatgcacaacatcaaatgtgttgtagtcggcgatggtgctgttggcaagacgtgtcttctcatctcttataccacaaatgcctttccaggagaatacgtgccaacagtattcgacaactactctgcaaatgtgatggtcgacgggaaaactatctctctcggtctatgggataccgctggacaagaagattacgatcgtctccggccactctcctaccctcaaacagatgtctttttgatctgtttctcgctcgtcagtccacctagctacgagaacgttagaaccaagtggtggcctgagatttcacatcatgcgccatctacttcggtggtcttggttggcactaaactggatttgcgtgaagatcctgctaccatcgagaaactccgtgaccggcgtatgcagcctatccagtacacgcaaggggtctcgatggcgagggatattggcgccgtcaagtatcttgaatgttctgcgctatcgcaaaagggcctaaagaccgtgtttgatgaggttatccgtgctgttttgaaccctcccccgaaggaaaagaagcgcagtggtcgtggttgtgttatcgtatgagtggatttgccattccacatgctcatatagatggattttctttgttttatcatatcacgcccatttatgttgttgcttctgttaaaaaaaaaa

SEQ ID NO: 282 - protein, 194 aa, Suillus bovinus
MHNIKCVVVGDGAVGKTCLLISYTTNAFPGEYVPTVFDNYSANVMVDGKTISLGLWDTAGQEDYDRLRPLSYPQTDVFLICFSLVSPPSYENVRTKWWPEISHHAPSTSVVLVGTKLDLREDPATIEKLRDRRMQPIQYTQGVSMARDIGAVKYLECSALSQKGLKTVFDEVIRAVLNPPPKEKKRSGRGCVIV

SEQ ID NO: 283 - DNA, 1065 bp, Suillus bovinus
  CDS (170)..(745)
gccaacatcgacaccgtactttctcatttcttctaccgacgtcctgttcgtaaattagagtcaaccttctctgtcgtgattgggttaatagcatttcctcgcttcaactctcctccttgaattttccggaagaatcgccaagtttatcacgtagaaccatctcaacgacatgcagactatcaaggttgtagtggtgggggacggtgctgtaggcaagacttgtttgttgatctcatacaccacgaacaaatttccaagcgactatgttccgactgtcttcgataactacgctgtcactgtaatgattggtgaagatccttacacactaggtcttttcgacaccgccgggcaagaggattatgaccgtctccggccactgtcatacccccaaaccgacgtcttccttgtttgctttagtgtaacgtcccctccatccttcgagaacgtgagggagaaatggattccggaggtacaccatcattgtccgggtgtcccatgtcttatcgttgggacgcaaatcgatttgcgggacgacgctcaagtgattgagaagctctccaggcagaagcaacgaccggtgccgaccgagcacggcgagaggctttccagagagcttggtgccgtcaagtacgtggagtgctcagccctgacgcagaaagggttgaagaacgtcttcgacgaggctattgtcgctgcgctagagccacccgtggttaagaagacacataaatgcgtcgtcgtttaatgaatgatccatcacgacggtacagcttgttttatcttcttatgactcctttacgccttgttctgcctcatatatccttctcatctttttttatgtcgtttctctcgttgcgccaagacatcatgattttccctagtcctgttgcatctgttctcttccgcacgagctgagtggacttgagctatctcgtgctcttaaagaagctgatctcatccgtctttctacaccacaattgatgactagttcgtattgttggaactgttgggtttgataggaatttaatacccatgacggggacttgtcatgtcaaaaaaaaaaaa

SEQ ID NO: 284 - protein, 191 aa, Suillus bovinus
MQTIKVVVVGDGAVGKTCLLISYTTNKFPSDYVPTVFDNYAVTVMIGEDPYTLGLFDTAGQEDYDRLRPLSYPQTDVFLVCFSVTSPPSFENVREKWIPEVHHHCPGVPCLIVGTQIDLRDDAQVIEKLSRQKQRPVPTEHGERLSRELGAVKYVECSALTQKGLKNVFDEAIVAALEPPVVKKTHKCVVV

SEQ ID NO: 285 - DNA, 576 bp, Yarrowia lipolytica
  CDS (1)..(576)
atgcagaccataaaatgtgttgttgtcggcgatggtgccgtcggaaagacttgtctcctcatctcatacacaacaaacaagttcccctctgaatacgttcccaccgtttttgacaactatgccgtgactgtcatgattggagacgagccctacacactcggactgttcgacaccgccggtcaggaggattacgaccgactgcgacctctttgttaccctcagaccgatgttttcctcgtctgcttttccgtcacctctcccgcctcctttgagaacgtcaaggagaagtggttccctgaggtccaccaccactgccccggcgtgccttgcctcattgttggtacccaggttgatccgcgaagtgacaggatgattcttgacaagctttcccgacacaagctgcgacccatgaccactgagcaaggctaccagctcgcccgagaactcggtgccgtcaagtacgtcgagtgttctgcccttactcagaagggtctcaaggacgttttcgacgaggccatcgtggcagctcttgagcctccagtggtcaagaagaacaaaaagtgcattgtgctctag

SEQ ID NO: 286 - protein, 191 aa, Yarrowia lipolytica
MQTIKCVVVGDGAVGKTCLLISYTTNKFPSEYVPTVFDNYAVTVMIGDEPYTLGLFDTAGQEDYDRLRPLCYPQTDVFLVCFSVTSPASFENVKEKWFPEVHHHCPGVPCLIVGTQVDPRSDRMILDKLSRHKLRPMTTEQGYQLARELGAVKYVECSALTQKGLKDVFDEAIVAALEPPVVKKNKKCIVL

SEQ ID NO: 287 - DNA, 1157 bp, Ashbya gossypii
  CDS (192)..(971)
gcaagagccttaaatcacctgcatcccccgatttcaacacccttgttagaaagaggtaaacagatcaccacggcgccagtaggtgaaaatcggcaggcagtgggtggcgttcaggacgcggcaaggaagggcagtggaagcaatcgcggtcggtttagcgggacagcgcgtcaagaggcagacagaacgaaatgagcgcagggccgttgcaagctgcgccaaagaagaattacggagcactgataggcgcggggccggcggtgggcggggcggcattcaaccggacgctgagcgaggttgcgagctacgagcgcagccggcgcgaccacgcgacgccggactaccggatcaagatcgtggtggtgggggacggcgcgacggggaagacgtctctgctgatgtcgtacacacagggccagttcccagaggactacgtgccgaccatcttcgagaactacgtgacgaacattgagggcccacgcgggaaggtgatcgagctggcgctgtgggacactgctgggcaggaggagtacagccggctgcggccgctgtcttacggggacgtggacatcgtgatggtgtgctacgcggcagacaaccgcacgtcgctgacgaacgcggaagagctgtggttcccggaggtgcgccacttctgcccgcacgcgccgatgatgctggtggggctcaagagcgacctgtactcgcttgatgcgctggaccggctcgtggacccgacggacgcggaactggtggcgcgcaagatgggcgccttcgtgcacctgcagtgctcggccaagacgcgacagtgcctggaggacgtgttcaacacggcgatacacacggcgctgtacgacgagctgcgcgcgcccccgcagcgcggggtgaagggcatgttcaagaagaagcagcagcgggacccgcaggcgcagtcttacaagcgggtgcgcaagcaccgctgtgtggtcctatagcgcacgtgacagccatgtttcgccggccctggttcctggcagcggaggcgcaagcgccgcgccggcgcgcctagtccgctgtcgaggcctgcgtgaccgtgtagttaggcatctagtcgtagcgagccaagatgttagtttaaatcgatcggtgcgacagcatcttgttaggatagagtactggga

SEQ ID NO: 288 - protein, 259 aa, Ashbya gossypii
MSAGPLQAAPKKNYGALIGAGPAVGGAAFNRTLSEVASYERSRRDHATPDYRIKIVVVGDGATGKTSLLMSYTQGQFPEDYVPTIFENYVTNIEGPRGKVIELALWDTAGQEEYSRLRPLSYGDVDIVMVCYAADNRTSLTNAEELWFPEVRHFCPHAPMMLVGLKSDLYSLDALDRLVDPTDAELVARKMGAFVHLQCSAKTRQCLEDVFNTAIHTALYDELRAPPQRGVKGMFKKKQQRDPQAQSYKRVRKHRCVVL

SEQ ID NO: 289 - DNA, 1067 bp, Oryza sativa
  CDS (131)..(775)
  MISC_FEATURE (957)..(957): n is a, t, g, or c
aagaacgaacaactcttctccccctctccccctccttccttgctcctcctcccatcttgtctcctccctctctctcgcaaagtcgcaacgcgctcctcctcggtgaaacgggagtgaggtgcgtgcggccatggcgtccagcgcctcccggttcatcaagtgcgtcacggtgggcgacggcgccgtgggcaagacctgcatgctcatctgctacaccagcaacaagttccccactgactacataccaacggtgttcgacaatttcagcgcaaacgttgttgtggacagcaccacggtgaatctgggcctctgggatactgctgggcaagaggattacaaccggctcaggcctctgagctatcgtggtgctgatgttttcgtgcttgccttctctcttgtgagccgagctagctatgaaaatattatgaagaagtggataccggagctacagcattatgcacccggcgtgcccattgtgttggttggcacaaaattggatctccgtgaagacaagcactacttgttggaccatcctggcatgatacctgttaccacagcacagggtgaagaacttcgaaaacaaataggtgctgcttattacattgagtgcagctcaaagacacaacagaatgtcaaaggtgtgtttgatgctgctatcaaggtagtaatccagcctccaactaagcagagggaaaagaagaaaaagaaatcacgacaaggatgctctatgatgaacatgttccgtggaaggaaaatgtcatgcttcaaatcctgattgatcgagatgtcccttacatgatgcaatgttctgggtgcaacctcaagctggcaacctttggagtctgaatgtgctggtagagttagatgcaaagttcttgtgtatatttgcatcttttggtaattaattactagagttagatggttaaactagtctgcttatgtaccgcacaatgcttnttattattagctcttgttggtctagaaagtctgatagatgccaaaggaacaaggagacaccgttctgtcaggacaaaatcacagattttgtaatcaaaaaaaaaaaaaaa

SEQ ID NO: 290 - protein, 214 aa, Oryza sativa
MASSASRFIKCVTVGDGAVGKTCMLICYTSNKFPTDYIPTVFDNFSANVVVDSTTVNLGLWDTAGQEDYNRLRPLSYRGADVFVLAFSLVSRASYENIMKKWIPELQHYAPGVPIVLVGTKLDLREDKHYLLDHPGMIPVTTAQGEELRKQIGAAYYIECSSKTQQNVKGVFDAAIKVVIQPPTKQREKKKKKSRQGCSMMNMFRGRKMSCFKS

SEQ ID NO: 291 - DNA, 1087 bp, Oryza sativa
  CDS (141)..(785)
aacaaagcagcttgccaccgtccctgcctctcctgctttgctttgccttctcggagaagacaaatctactgtagctgcttgtctctgttcgccggtggcgaccgtgagaggaggaggtagtcctagtcctagtaggcgagatgagcggcgccaccaagttcatcaagtgcgtcaccgtcggcgacggcgccgtcggcaagacctgcatgctcatctgctacaccagcaacaagttccccaccgattacatccccaccgtgttcgacaacttcagtgctaatgtttcagtggatgggaacatcgtcaacttgggattatgggacactgctggacaagaggattacagcaggctgaggccactgagctacaggggagcggatatatttgtgctggcattctcactgatcagcagagcaagctatgagaatgttctcaagaagtggatgccggagcttcgccggttcgcaccgaatgttccaattgttcttgttgggaccaagttagatctacgtgaccacagatcttaccttgcggaccatcctgctgcttccgcaattacgactgcacagggtgaagaacttagaaagcagataggcgccgcggcctacatcgaatgcagttcgaaaacacaacagaacatcaaggccgtgtttgatactgccatcaaggtggtccttcagcctcctcggagaaggggggagacgacgatggcaaggaagaagacaaggcgaagcaccggctgctcgttaaagaacttgatgtgtggcagtgcatgtgttgtttaggacctgtctgaattcttgaaggtgtgtaagcgttgtgtaatggcaagtgaatttgctgactgttctgctgcttccatttactactactaagctctttcgtgtgtttgaattactacatctaaaactagagcatcaggctcatagactgacttcatatcaggtgtttgtatcattaatattattatgtaagaaggttgtggtttgtggaacaactaaatacaacaatgcaggctatgttgtactatgctctgctactggtgtttgttataaatatcacatcctgctaaaaaaaaaaaaaaaaa

SEQ ID NO: 292 - protein, 214 aa, Oryza sativa
MSGATKFIKCVTVGDGAVGKTCMLICYTSNKFPTDYIPTVFDNFSANVSVDGNIVNLGLWDTAGQEDYSRLRPLSYRGADIFVLAFSLISRASYENVLKKWMPELRRFAPNVPIVLVGTKLDLRDHRSYLADHPAASAITTAQGEELRKQIGAAAYIECSSKTQQNIKAVFDTAIKVVLQPPRRRGETTMARKKTRRSTGCSLKNLMCGSACVV

SEQ ID NO: 293 - DNA, 1059 bp, Cicer arietinum
  CDS (118)..(711)
cttcttcatcccttcttcttgatcattcattcgttcattcaccaagttcgaacttgaacgcacaacagcattaccacatgagtaattagggtttatacagcaacaagaaacataaaaatgagtgggtccaggttcattaagtgtgttaccgtaggtgacggtgccgtaggcaagacttgtttgcttatctcctacaccagcaacactttccctacggactatgtgcctactgtctttgataatttcagtgcaaatgtagttgtggatgggagcactataaatctgggtttgtgggatactgctggccaagaagattacaatagattaagacccttaagctatcgtggagcggatgttttcctgcttgctttctcactcataagcagggccagctatgaaaatatcgccaagaaatggattcctgagttgaggcattatgctcctggtgttccaattattctcgttggaacaaaacttgatcttcgggatgataagcaattctttcaagaccatcctggtgcggtgccaatcaccacagcacagggtgaggaactgagaaagcttattggtgctccagtttacattgaatgtagttccaaaacacaaaagaatgtgaaggctgtttttgatgcggccatcaaagtagttctacagccgccaaagcaaaagaaaactaagagaaaggggcaaaaagcctgttccattttgtgatcttcagttcttcatattgtagttggtggagaggacgacatgatagtaaccatttcctggtagtctttgccattctgattctatatcttaccctattttcaacctacatggaggaatcgacgtgtccaactgagtcctaactacataaggtttgcttataagcatcaagctatttgtctctggctgaaggatatatgtaaagtcataatttcaaacatgtttggtgtgtagaacaactcttgtgtttctctgggatgtttttacctgttgtattgattattaaatgaccatctccaattgtggacatgggttttactcacattgtaatctaatctaggaagtgcttgc

SEQ ID NO: 294 - protein, 197 aa, Cicer arietinum
MSGSRFIKCVTVGDGAVGKTCLLISYTSNTFPTDYVPTVFDNFSANVVVDGSTINLGLWDTAGQEDYNRLRPLSYRGADVFLLAFSLISRASYENIAKKWIPELRHYAPGVPIILVGTKLDLRDDKQFFQDHPGAVPITTAQGEELRKLIGAPVYIECSSKTQKNVKAVFDAAIKVVLQPPKQKKTKRKGQKACSIL

SEQ ID NO: 295 - DNA, 805 bp, Wuchereria bancrofti
  CDS (26)..(601)
cggcacgagcaagtttgaggtaaagatgcagactatcaaatgtgtagtggttggagatggtgctgtcggcaaaacatgccttcttatttcgtatactaccaacaagtttcccagtgaatatgtacccactgtatttgacaattatgctgtaacagtaatgattggaggagaaccatatacgcttggtttgttcgatacagccggtcaagaggattatgatagattgcgtcctctttcatatccgcaaacagatgtatttttagtgtgcttttctgtcgttgcaccttcatctttcgaaaatgtgaaagagaagtgggtgccggagatagcacatcactgcatgaagacaccgttcctgctggtcggaactcagattgatcttcgtgacgatccttcctacatcgaaaaattggcaaaaatcaagcaacgaccaattacattcgaagttggagagaagttagcgaaagaattaaaggcagtgaaatacgtcgaatgttctgcactcacacagaaaggtctaaaaaatgtatttgatgaagcaatactggcagcattggaaccaccggcacaggagaaaaagaagaaatgtactatactttagcatcattgtttctcgatcacgttatattgatttctgatttgttagtcatttatctgtaaatgattatgttaacgtcttaaatgctgcacataccattactacgtcccctcttctggttggtccatctgcgcatatgtgtagtgtttccatctatgcgatatacgtgtagaatgaatgtattcctgtacaaaaaaaaaaaaaaaa

SEQ ID NO: 296 - protein, 191 aa, Wuchereria bancrofti
MQTIKCVVVGDGAVGKTCLLISYTTNKFPSEYVPTVFDNYAVTVMIGGEPYTLGLFDTAGQEDYDRLRPLSYPQTDVFLVCFSVVAPSSFENVKEKWVPEIAHHCMKTPFLLVGTQIDLRDDPSYIEKLAKIKQRPITFEVGEKLAKELKAVKYVECSALTQKGLKNVFDEAILAALEPPAQEKKKKCTIL

SEQ ID NO: 297 - DNA, 579 bp, Emericella nidulans
  CDS (1)..(579)
atggtcgtagcaactatcaagtgtgttgtggtcggtgatggtgctgtcgggaagacctgtctcctgatctcatacacaacgaacaaattcccttcagaatatgtgcccaccgtgttcgataactatgctgtgactgtcatgatcggcgatgagccctacactctaggattatttgatactgctggtcaagaagattatgaccgacttcgtcctctctcatacccgcagacagatgtattccttgtctgcttttctgtgacctcccccgcatctttcgagaacgtgcgcgaaaagtggttccccgaagttcaccaccactgccccggcgtcccatgcctgattgttgggacacaagtcgatctccgggatgaccccgccgttcgcgacaagctggctcggcaaaagatgcaaccgattcgcaaagaagacggtgaccgcatggccaaggatctgggcgccgtgaaatatgtcgaatgctccgcattgacccaatacaagctcaaggatgtctttgacgaggctattgttgcggcactcgaaccggcccctaagaagaggtcgaggtgcgttctgctatag

SEQ ID NO: 298 - protein, 192 aa, Emericella nidulans
MVVATIKCVVVGDGAVGKTCLLISYTTNKFPSEYVPTVFDNYAVTVMIGDEPYTLGLFDTAGQEDYDRLRPLSYPQTDVFLVCFSVTSPASFENVREKWFPEVHHHCPGVPCLIVGTQVDLRDDPAVRDKLARQKMQPIRKEDGDRMAKDLGAVKYVECSALTQYKLKDVFDEAIVAALEPAPKKRSRCVLL

SEQ ID NO: 299 - DNA, 588 bp, Drosophila melanogaster
  CDS (1)..(588)
atgtcaaccggaaggcccataaagtgtgtagtcgttggtgacggcaccgtcggaaagacctgcatgctaatctcctacacgacagactgctttcccggcgaatatgtgcccacagtcttcgacaactactcggcgcccatgcaagtggacacaatacaggtctcgctgggactgtgggatacggcgggtcaggaggactacgaccgcctgagaccgctatcctacccgcagacagacgttttcctgatatgctacagcgtggcgagtccctcgtcctttgagaacgtcacctcgaaatggtatccggagataaagcaccactgtcccgatgcgcccatcattctagttggcaccaaaatcgatttgcgcgaagatcgagagacactcagcggcctggcagagcagggactgacgccgctgaagcgcgagcagggccagaagctggcaaacaagatacgcgctgtgaaatacatggagtgctccgccttgacgcagcgcggtctcaagccggtgttcgaggaagcggtgcgcgcggtgctcagaccagagccgctaaagcgacgccagcgaaagtgtttaataatgtaa

SEQ ID NO: 300 - protein, 195 aa, Drosophila melanogaster
MSTGRPIKCVVVGDGTVGKTCMLISYTTDCFPGEYVPTVFDNYSAPMQVDTIQVSLGLWDTAGQEDYDRLRPLSYPQTDVFLICYSVASPSSFENVTSKWYPEIKHHCPDAPIILVGTKIDLREDRETLSGLAEQGLTPLKREQGQKLANKIRAVKYMECSALTQRGLKPVFEEAVRAVLRPEPLKRRQRKCLIM

SEQ ID NO: 301 - DNA, 582 bp, Xenopus laevis
  CDS (1)..(582)
atggcagccattcgtaagaagctcgtaattgttggagatggtgcatgcgggaaaacctgccttctgattgtgttcagtaaagaccagtttccagaagtgtatgtcccaacagtttttgagaactatgtggcagacatagaagtggatggcaagcaggttgagttggccctatgggatacagctggtcaagaagattatgacagactgcgacctctgtcctatccagacactgatgttatattaatgtgcttttccattgatagccccgacagtttagaaaacatacctgagaaatggaccccggaggtgaaacatttctgccccaatgtgcccattattttagttggaaacaagaaggatctgcgtaatgatgaacacactcgtagggagctcaccaaaatgaaacaggagcctgtgaagcccgaagaaggtcgtgacatggcaaaccgtatctccgcctacgcgtacatggaatgctctgcaaaaacgaaagatggcgtgagggaagtgtttgagctggctacacgggcagccctgcaagctaggcgtggcaagaagaaaccacgttgccttctcatctaa

SEQ ID NO: 302 - protein, 193 aa, Xenopus laevis
MAAIRKKLVIVGDGACGKTCLLIVFSKDQFPEVYVPTVFENYVADIEVDGKQVELALWDTAGQEDYDRLRPLSYPDTDVILMCFSIDSPDSLENIPEKWTPEVKHFCPNVPIILVGNKKDLRNDEHTRRELTKMKQEPVKPEEGRDMANRISAYAYMECSAKTKDGVREVFELATRAALQARRGKKKPRCLLI

SEQ ID NO: 303 - DNA, 591 bp, Physcomitrella patens
  CDS (1)..(591)
atgagcacttcacggtttatcaagtgcgtgactgttggagatggagctgtcgggaagacgtgcatgcttatttcatacaccagcaacacatttcctactgattacgttcctaccgtgtttgacaacttcagcgcaaatgtagtggtcgatggaaataccgtcaacctcgggttatgggatacagcaggtcaagaagattacaacaggcttcgtcctctgagttacaggggtgctgatgtttttctcctggcgttctccctcatcagcaaggctagttatgaaaacatatcaaagaagtggatcccggaactgagacattacgcgccatctgtgccaatcattctcgtcggaacaaaacttgatcttcgcgatgacaaacaattctttgctgatcatcctggagcggctccaataactacttctcaaggggaggagctcaggaagtcgattggggcggcctcgtacatagagtgcagctcaaagactcagcagaatgtaaaagcagtttttgacgcagcaatcaaggtggttctccaaccaccaaagcagaagaagaagaagaaaaaacaaaagaattgcgtcattctgtga

SEQ ID NO: 304 - protein, 196 aa, Physcomitrella patens
MSTSRFIKCVTVGDGAVGKTCMLISYTSNTFPTDYVPTVFDNFSANVVVDGNTVNLGLWDTAGQEDYNRLRPLSYRGADVFLLAFSLISKASYENISKKWIPELRHYAPSVPIILVGTKLDLRDDKQFFADHPGAAPITTSQGEELRKSIGAASYIECSSKTQQNVKAVFDAAIKVVLQPPKQKKKKKKQKNCVIL

SEQ ID NO: 305 - DNA, 841 bp, Schistosoma mansoni
  CDS (7)..(588)
gcaacaatggcgagtgcggtacgtaagaaacttgttattgttggagatggtgcatgcgggaaaacttgtttacttattgtattcagcaaagaccagtttcccgaagtttacgttcctactgtattcgaaaactatgttgcagatatcgaagttgataacagacaagttgaattagctctctgggacactgctggccaagaagattatgataggctacggccactttcttatcctgatacggatgtagttctgttatgttatagtattgactctcccgatagttttgcaaacattgaggaaaaatggttaccagaaatccgtcatttttgtcctgatgttcccattgtcttagttggaaacaaaaaagacttacgacatgacgaggctacaaagaatgagctacacagaaccaaacaacttcctgtcacttttaacgagggtaaacaagtagctgaaaagatttctgcttatgccttctttgagtgttcagctaagaccaaggaaggagtcagcgatgttttcgtagcagctactcgagccgccttgaattcagcgaagaagaagaggaggaggtgtgatttaatttgatctccactgttctctaaattgtctagatttgattttccggtctccgaaacatacattcccctcctaattcttcctcaggaccttaaattgctacttctatcggctgcgtgtttcttttacaatcatattttttgtttgccaacaagacaatccattccacggaaatatttgccatttatttttgccttggtactaaaatagggcatgcctcatgtaacttatatttattgagaataaattactataatcagtc

SEQ ID NO: 306 - protein, 193 aa, Schistosoma mansoni
MASAVRKKLVIVGDGACGKTCLLIVFSKDQFPEVYVPTVFENYVADIEVDNRQVELALWDTAGQEDYDRLRPLSYPDTDVVLLCYSIDSPDSFANIEEKWLPEIRHFCPDVPIVLVGNKKDLRHDEATKNELHRTKQLPVTFNEGKQVAEKISAYAFFECSAKTKEGVSDVFVAATRAALNSAKKKRRRCDLI

SEQ ID NO: 307 - DNA, 576 bp, Gallus gallus
  CDS (1)..(576)
atgcagacgattaagtgtgtagttgtgggtgatggtgctgttggtaaaacctgtctcttaatttcttacacaacaaataaatttccatcggaatacgtaccaacggtttttgataactatgctgtaacagtgatgattggaggagagccttacactctaggcctctttgatactgcaggtcaggaagattatgatagattacgacccctcagctatccacagacagatgtatttctggtctgtttttcagtggtatctccttcttcatttgaaaatgtgaaagaaaagtgggtacctgaaattactcaccattgtccaaagactccttttctgcttgttgggacccaaattgatctaagagatgatccctcaacaattgaaaaacttgccaagaacaagcagaagcccataactccagagacggctgaaaaactggcccgggacctgaaggctgttaaatatgtggaatgctctgcgcttacgcagaaaggcctaaagaatgtatttgatgaggcgatattggctgccctggagcctccggagccgaagaagactcgcaggtgtgtgctgctatga

SEQ ID NO: 308 - protein, 191 aa, Gallus gallus
MQTIKCVVVGDGAVGKTCLLISYTTNKFPSEYVPTVFDNYAVTVMIGGEPYTLGLFDTAGQEDYDRLRPLSYPQTDVFLVCFSVVSPSSFENVKEKWVPEITHHCPKTPFLLVGTQIDLRDDPSTIEKLAKNKQKPITPETAEKLARDLKAVKYVECSALTQKGLKNVFDEAILAALEPPEPKKTRRCVLL

SEQ ID NO: 309 - DNA, 2011 bp, Candida albicans
  CDS (540)..(1580)
tctagatttccttactgtaaatcttaaggatcttcaatgatctatccctaacttcaattatagttcacaatacgctatgacgagcatctaaactatgtcaatatctgaaaaggctaattttttgttttgttttaaagcactttgtgattttaaggatattttccttaaatattatttttagaaataaatacagggacgactgattggaaataataaaacataaacactgcccatttcaggcacgcaaaaaaacaaaaaaaccgtgcccttttctttttcatgttttcctttcccgattttttctctctctctttatttctttctctctagattttttttactgatctcacactatcaccacatatacacactcacacattatataatcttcaattataactcatctgggttctaacagtttctttttttttctaacttgctttttttttaataaagtttctataatttcgatacaccaattttgttttcactatttagttattgtaacgttctagtttgaaaatccatttctataagatatgacacccaacggcagtaggagacattcggcgtacatggggtcgcccagaagccagcatagttccacaatggaaacaggttacaatccttacgaagcagtacagaagaaacaggaattataccaaaataacaacggcaattcaccaaccgtcatcattgaagaagatccatacatcccaaattataaagagctgtctctagcaaataagaaaacaaattataacatgaaaattgtcgttgtcggtgacggtgggtgtggtaagacgtgtttattattagcatacacacaaaacaaatttccttcaatctatgttcccacagtttttgagaattatgtgacggcagtacagtcgcctaatggtaaaaccgtggaattggctctctgggatactgctggccaagaagaatacgataggttacgaccactaagctatcctgacgttgatattttattggtgtgttttgccgtggacaatgaagttagtttggagaatgtcaaggatatgtggttccccgaagtgaatcattattgtcctggtattcccattattttggttggtaccaagagtgatttactgtctgatatgaatcacgatgcatcaatacgagtagccaaagaaattggcgccattggattgattttcacatcagccaagaccatgttcaatgtacggactgtttttaattttgcattaaaccattttcaaagaaatatggaattgcaggaacaatatgaaaagacattgggttcaagaaagagaataagtagagtattgggtggtagtaatggaggcagtgggaaccattccagacatcattctagaaactactccaacgtttcgaacaacagaaggggccatttgaagaacacatcatacgattccacggcattgttggatcaaccgttgacagaagacacctatgtgaaaaatccttatgggaactttggctataaagcaaatgttgaaagtccgtataatcaggatgagtttgcatttacaagagaaagaaagaagaagaaaaagtgtgtaatattgtagatacctctttgattaggtccataataatatattaaagttctgcatatgacaagaaatcgttttgtagaaagcacatgaaatcatgtcacaattgcatggctagtttacaggtctctggatttcgaattggatgaaagtataattataaaaccaattagtgtctgggaatactacataactgtctactgagatttcctatagtgagatatctaactggtcaaagtgtagtacttttgaagtgatattgggttacttgctgtatatatcgtcaatgttccgtttatccttcttatccgagactagtatagcaattattatcattaatccttaacaaatgaacaggctccagcttgtcgaaaaaacactgggcacttcatcattttgtagtggtaaatctttatattggtttccaatattatagatcctctaga

SEQ ID NO: 310 - protein, 346 aa, Candida albicans
MTPNGSRRHSAYMGSPRSQHSSTMETGYNPYEAVQKKQELYQNNNGNSPTVIIEEDPYIPNYKELSLANKKTNYNMKIVVVGDGGCGKTCLLLAYTQNKFPSIYVPTVFENYVTAVQSPNGKTVELALWDTAGQEEYDRLRPLSYPDVDILLVCFAVDNEVSLENVKDMWFPEVNHYCPGIPIILVGTKSDLLSDMNHDASIRVAKEIGAIGLIFTSAKTMFNVRTVFNFALNHFQRNMELQEQYEKTLGSRKRISRVLGGSNGGSGNHSRHHSRNYSNVSNNRRGHLKNTSYDSTALLDQPLTEDTYVKNPYGNFGYKANVESPYNQDEFAFTRERKKKKKCVIL

SEQ ID NO: 311 - DNA, 710 bp, Beta vulgaris
  CDS (91)..(684)
ttgattgatcaagaggagaagagagagtgagaggttgtttgaatagaagatcgttagatatttttttttttaattttttttgttaaaaaaatgagtgcttcgaggttcataaaatgtgttacagttggtgatggtgccgttggtaaaacttgcttgttgatttcttacaccagcaacacctttcctacggactacgtgcccactgtttttgacaatttcagtgccaatgtcgtcgttaacggggccacagttaatctgggattatgggatactgcaggacaagaggattataacagattaagacctttgagttatcgtggagcagatgtttttattctcgctttctcccttattagcaaggctagttatgaaaatgtttctaagaagtggattcctgagttgaagcattatgctcctggtgtccccattgttcttgttggaacaaagctcgatcttcgggatgacaagcagttttttatcgaccaccctggtgcagttccaatcactacagctcagggagaggaattaaggaaactgattggggctcctgcttacatcgaatgcagttcaaaaacacagcagaatgtcaaggcagtttttgatgcagccattaaggtcgtgcttcaaccaccaaagacaaagaaaaagaagtcaaaggcacagaaggcttgctccatattgtaattgtgtaagttgtaaagagaaacaag

SEQ ID NO: 312 - protein, 197 aa, Beta vulgaris
MSASRFIKCVTVGDGAVGKTCLLISYTSNTFPTDYVPTVFDNFSANVVVNGATVNLGLWDTAGQEDYNRLRPLSYRGADVFILAFSLISKASYENVSKKWIPELKHYAPGVPIVLVGTKLDLRDDKQFFIDHPGAVPITTAQGEELRKLIGAPAYIECSSKTQQNVKAVFDAAIKVVLQPPKTKKKKSKAQKACSIL

SEQ ID NO: 313 - DNA, 581 bp, Cavia porcellus
atgcaggccatcaagtgtgtggtggtgggagatggagctgtgggcaagacctgcctccttatcagctacaccaccaacgccttccccggagagtacatccccaccgtgtttgacaactattcagccaatgtgatggtggacagcaagcccgtgaacctggggctgtgggacacagctggccaggaggactatgaccgcctgcgaccgctctcctacccacagacggacgtcttcctcatctgcttctccctcgtcagtccggcctcctatgagaatgtccatgccaattggtaccccaaagtgcggcaccactgccccagcacccccatcatcctgttgggcaccaagctggacctgcgggatgacaaggagaccatcgagaagctgaaggagaagaagctggcgcccatcacctacccacagggcctggcactggccaaggagattgactctgtgaagtacctggagtgctcagccctcacccagagaggcctgaagaccgtctttgacgaggccatccgtgccgtcctgtgccctcagcccacgcggccacagaagcgcgcctgcagcctcctctatag

SEQ ID NO: 314 - protein, 192 aa, Cavia porcellus
MQAIKCVVVGDGAVGKTCLLISYTTNAFPGEYIPTVFDNYSANVMVDSKPVNLGLWDTAGQEDYDRLRPLSYPQTDVFLICFSLVSPASYENVHANWYPKVRHHCPSTPIILLGTKLDLRDDKETIEKLKEKKLAPITYPQGLALAKEIDSVKYLECSALTQRGLKTVFDEAIRAVLCPQPTRPQKRACSLL

SEQ ID NO: 315 - DNA, 982 bp, Lotus japonicus
  CDS (113)..(703)
attttgtgtgtctcactctttttcgcttgttctatttttagtttcaagtgaaagaaatatggaaagctttgctgtaaggtaaggaaaatcagttcagaaaaggaggttgaaaatgagcacagctagattcatcaagtgtgttactgttggagatggagcagtgggaaagacctgtatgcttatctcttacaccagcaacacattcccaacggattatgtgcctactgtttttgataacttcagtgcaaatgtggtggttgatggcagcacagttaacctgggattatgggacactgctggacaggaggattacaataggcttaggcctttgagctacagaggagcagatgtgttcttgctggctttttccctccttagcagagccagctatgaaaatatctccaaaaagtggattcctgaactgagacactatgccccaactgtgccaattgttcttgtgggaaccaaacttgatttgagggaagacaggcagtatttgattgatcatcctggagccacacctattactactgcccagggagaagagctgaagaaggcaattggtgctgctgtgtacctagaatgcagctcaaagactcaacagaatgtgaaggctgtgtttgatgctgctatcaaggttgttttgcagccacctaaaccaaagaaaaaacgaaagaagaccagaccatgcgttttcctttaattgatgttcatgtttgattcgcaatctgtagcattcgggaccttcttcctatgttttttaccctttatttgattgcacaaatatgctttttgaacatatgtattacacactcttatcttctttccgttttcttgtattttttgttggtgggtctaagtgatatttcaatgtatctactggaacaaacaaggagactgtactcgatcaaagataaattttgtgataagaaataatagcattcatagtgactttttttattaaaaaaaaaaaaaaaaaaaa

SEQ ID NO: 316 - protein, 196 aa, Lotus japonicus
MSTARFIKCVTVGDGAVGKTCMLISYTSNTFPTDYVPTVFDNFSANVVVDGSTVNLGLWDTAGQEDYNRLRPLSYRGADVFLLAFSLLSRASYENISKKWIPELRHYAPTVPIVLVGTKLDLREDRQYLIDHPGATPITTAQGEELKKAIGAAVYLECSSKTQQNVKAVFDAAIKVVLQPPKPKKKRKKTRPCVFL

SEQ ID NO: 317 - DNA, 659 bp, Dictyostelium discoideum
  CDS (22)..(609)
ggttaaaaagtttacataatcatgcaatcaattaaattggtggtagtaggtgatggtgctgttggtaaaacttgtttattaatttcttatacatcaaattctttcccaacagaatacgttccaactgtatttgataactattcagcaaatgttatggtagataataaaactgtttcattaggtctttgggatactgctggtcaagaggattatgatcgtttaagaccactttcatacccacaaaccgatgtttttcttatttgtttcgctattataagtcaaacttcatatacaaatgtaaaatctaaatggtggcctgaagtcacacatcattgtccaaactgcacaattattttagttggtacaaaatgtgatttaagagaagacaaagaaagtttagaaaaactcagagaaaaacatcaacaaccactcaccttccaacaaggtgaacaaatggcaaaagaaattaaagccttttgttatatggaatgttccgctttaactcaaaaaggtctcaaacaagttttcgacgaagctattaaagctgttattttcccagatagagataaggccacaaacaaaaagaattcaaaatgttcaattttataaaaacatatcaaaatatctctattctttataataatcacaaccaaaaaaaa

SEQ ID NO: 318 - protein, 195 aa, Dictyostelium discoideum
MQSIKLVVVGDGAVGKTCLLISYTSNSFPTEYVPTVFDNYSANVMVDNKTVSLGLWDTAGQEDYDRLRPLSYPQTDVFLICFAIISQTSYTNVKSKWWPEVTHHCPNCTIILVGTKCDLREDKESLEKLREKHQQPLTFQQGEQMAKEIKAFCYMECSALTQKGLKQVFDEAIKAVIFPDRDKATNKKNSKCSIL

SEQ ID NO: 319 - DNA, 634 bp, Dictyostelium discoideum
  CDS (46)..(624)
gatcatatttaaattatacaaaaaacaattacatatatataaagaatgtcagcagcagaagttattaaattagtcgttattggtgatggtgctgtaggtaaaacttgtttattgattagttatgcaaacaatcgtttcccagaagattatattccaactgtattcgataattatgttgtaaatcttacagcaggtgatagaaacatagaactcggactttgggatactgcaggtcaagaagagtacgataaattaagaccattaagttatgcaaatgcaaatgtatttttaatttgcttctcaattaccaatccagtttcatttgaaaatgtttacacaaaatggtacccagaagttatgcatttttgcccagaagttccacaaattttagttggtactaaattagatacacgtgacgatagaggtgttttagataaacttcaacaaactggtcataaaccaattacaaccgaacaaggtaacgatttagccagaagaattaaagccattaaatatatggaatgttctgccaaaacctcacaaaatctcaaacaagtctttgatgaagccattaaatctgttttgtttatcaaaaaaaagaaatccaagtgtattgttatgtaacccgctctcc

SEQ ID NO: 320 - protein, 192 aa, Dictyostelium discoideum
MSAAEVIKLVVIGDGAVGKTCLLISYANNRFPEDYIPTVFDNYVVNLTAGDRNIELGLWDTAGQEEYDKLRPLSYANANVFLICFSITNPVSFENVYTKWYPEVMHFCPEVPQILVGTKLDTRDDRGVLDKLQQTGHKPITTEQGNDLARRIKAIKYMECSAKTSQNLKQVFDEAIKSVLFIKKKKSKCIVM

SEQ ID NO: 321 - DNA, 765 bp, Dictyostelium discoideum
  CDS (1)..(765)
atggctacaggtattaagaaaactgttaaagtagtagttgtaggtgatggtgctgttggtaaaacttcacttttaattttatatacaactaaagcattcccaaaagattatgtaccaacagtatttgataactttaattgtttagagatgtacgataataaaccagttaatttagtattgtgggataccgctggtcaagaagattatgataatttacgtccattgtcatatccacagactgatgtatttataatatgttattcagtagttaaaagagattcgttagataatataaagtataaatggttacctgaaattaatcaaactaatcagggtacaccaattattttagttggtacaaagactgatttaagggaggacaaaaaaacattatcacaattacaagaatcaaaacaagaaccagtttcaagagatgaaggtgtagcattagcaaaagagataggtgcagtacaatttttcgaatgttctgcattgacaggtaatggtgtaaatgatattttcgctgctgcaattaaagcagcttttaataaacctgctgtaacttcaccaacttcgaaatctagtggtaaatcttcaccttcatctacctcttcaaaaccttctaaaactactactacaactacaacctcttcttcttcttcttcaccacctgctgcttcaactgcaaaaccagcaggtgaaaagaaattaagttggggtttgttccgtaaaaaagataaagatgaaaagaaaccagcaaaataa

SEQ ID NO: 322 - protein, 254 aa, Dictyostelium discoideum
MATGIKKTVKVVVVGDGAVGKTSLLILYTTKAFPKDYVPTVFDNFNCLEMYDNKPVNLVLWDTAGQEDYDNLRPLSYPQTDVFIICYSVVKRDSLDNIKYKWLPEINQTNQGTPIILVGTKTDLREDKKTLSQLQESKQEPVSRDEGVALAKEIGAVQFFECSALTGNGVNDIFAAAIKAAFNKPAVTSPTSKSSGKSSPSSTSSKPSKTTTTTTTSSSSSSPPAASTAKPAGEKKLSWGLFRKKDKDEKKPAK

SEQ ID NO: 323 - DNA, 672 bp, Dictyostelium discoideum
  CDS (1)..(672)
atgtcagaagatcaaggttcaggagcaacaagagttaaattagtagttgtcggtgatggtgctgttggtaaaacatgtcttttaatttgttatgcacaaaatgattttccagtagattatgtaccaactgtttttgaaaattatacagcaaccagaaagagaggaaatgaagatattaaagtacatttatgggatactgcaggccaagaagaatatgatcgtttacgtccattatcatacccaggcgctgatgttgttctcctttgtttcagcacaatcagtcaatcatcatatgaagccattagagataaatgggcaccagaagttaatcactatatcccagatgtaccatcaattttagttggtactaaaatcgatttacgtgaacaacaacacccagatccaaactctggtaaattcgaaccaatcactgccgatatgggtatttcaatgcaaaaacaaattaaagccaagaaatatttagaagtctctgcaaagactcgtcaaggtttagaagaagttttcagtgctgccattgaaatcgttcttgaatcaagaggtatggataaaaagagtcaagatggttcttcaagtgcatctggtgttccatcaggtgataaaccaacaaaaggaaaagcaggtaaaaagaaatctggttgtattatactttaa

SEQ ID NO: 324 - protein, 223 aa, Dictyostelium discoideum
MSEDQGSGATRVKLVVVGDGAVGKTCLLICYAQNDFPVDYVPTVFENYTATRKRGNEDIKVHLWDTAGQEEYDRLRPLSYPGADVVLLCFSTISQSSYEAIRDKWAPEVNHYIPDVPSILVGTKIDLREQQHPDPNSGKFEPITADMGISMQKQIKAKKYLEVSAKTRQGLEEVFSAAIEIVLESRGMDKKSQDGSSSASGVPSGDKPTKGKAGKKKSGCIIL

SEQ ID NO: 325 - DNA, 579 bp, Homo sapiens
  CDS (1)..(579)
atgcaggccatcaagggtgtggtggtgggagacggagctgtaggtaaaacttgcctactgatcagttacacaaccaacgcatttcctggagaagatatccctactgcctttgacaattattctgccaatgttatggtagatggaaaactggtgaatctgggcttatggaatacagctggacaagaagattatgacagattacgccccctatcctatccgcaagcagatgtgttcttaatttgcttttcgcttgtgagtcctgcatcatttgaaaatgtccttgcaaagtggtatcctgaggtgcagcaccactgtcccaacactcccattatcctagtgggaactaaacttgatcttagggatgataaagacaggatccagaaactgaaggagaagaagctaactcccatcacctatccgcagggtctagccatggctaaggagatgggtgctgtaaaatacctggagtgcttggccctcacaaggcgaggcctcaagacagtgtttgacgaagcgatccgagctgtcctctgcccacctcccgtgaagaagaggaagagaaaatgcctgcagttgtag

SEQ ID NO: 326 - protein, 192 aa, Homo sapiens
MQAIKGVVVGDGAVGKTCLLISYTTNAFPGEDIPTAFDNYSANVMVDGKLVNLGLWNTAGQEDYDRLRPLSYPQADVFLICFSLVSPASFENVLAKWYPEVQHHCPNTPIILVGTKLDLRDDKDRIQKLKEKKLTPITYPQGLAMAKEMGAVKYLECLALTRRGLKTVFDEAIRAVLCPPPVKKRKRKCLQL

SEQ ID NO: 327 - DNA, 594 bp, Dictyostelium discoideum
  CDS (5)..(589)
cataatgcaagcaattaaatgtgtagttgttggtgatggtgcagttggtaaaacatgtcttttaatttcatatacaaccaatgcttttccaggagagtatatcccaacagtttttgataattacagcgcaaatgtaatggttgatggtaaaccaattaatctcggattatgggatacagcaggtcaagaagattatgatcgtttacgtcctttatcctatcctcaaactgatgttttcttaatttgtttttcaatcgtttcaccagcatcttttgagaatgtaaatggtaaatggcatccagaaatatgtcaccatgcaccaaatgttcgaatcattttagttggtactaaattagatatgagagaagatagagatactcaagatagattaaaagagaaaaaactttatccagtttcctatgaacaaggtctttcaaaaatgaaagaaattaatgctgtcaaatatcttgaatgttcagctctcacacaaaaaggtcttaaaactgtttttgatgaagcaattagatctgtaattaatccaactcttaagaaaaaaccaaaatcttcaaaaggttgtattataatgtaaaaaaa

SEQ ID NO: 328 - protein, 194 aa, Dictyostelium discoideum
MQAIKCVVVGDGAVGKTCLLISYTTNAFPGEYIPTVFDNYSANVMVDGKPINLGLWDTAGQEDYDRLRPLSYPQTDVFLICFSIVSPASFENVNGKWHPEICHHAPNVRIILVGTKLDMREDRDTQDRLKEKKLYPVSYEQGLSKMKEINAVKYLECSALTQKGLKTVFDEAIRSVINPTLKKKPKSSKGCIIM

SEQ ID NO: 329 - DNA, 591 bp, Dictyostelium discoideum
  CDS (8)..(589)
aaaaaaaatgcaagcaattaaatgtgtagttgtaggtgatggtgcggttggtaaaacatgtcttttaatttcttatacaactaacgcttttcctggagagtatatcccaacagttttcgataattactcagctaatgttatggttgatggtaaaccaattaatcttggcttgtgggatactgctggtcaagaagattatgatcgtttacgtccactttcatatcctcaaactgatgttttcttaatttgcttttcaattatttctccatcatcatatgaaaatgtttcaggtaaatggggaccagaagtatttcatcatgctccaaatgttccaatcattttggttggtacaaaaatggatatgagagaagataaggaaactcaagatagattaaaagaaaagaaactttatccagtttcctatgaacaaggtcttttaaaaatgaaagaaattaatgctttcaaatatcttgaatgctctgctctcactcaaaaaggtcttaaaactgttttcgacgaagctattagatctgtaattaatccaccagttaaaaaatcaaaaagtaaaagtggatgtaatatcttgtaaaa

SEQ ID NO: 330 - protein, 193 aa, Dictyostelium discoideum
MQAIKCVVVGDGAVGKTCLLISYTTNAFPGEYIPTVFDNYSANVMVDGKPINLGLWDTAGQEDYDRLRPLSYPQTDVFLICFSIISPSSYENVSGKWGPEVFHHAPNVPIILVGTKMDMREDKETQDRLKEKKLYPVSYEQGLLKMKEINAFKYLECSALTQKGLKTVFDEAIRSVINPPVKKSKSKSGCNIL

SEQ ID NO: 331 - DNA, 723 bp, Entamoeba histolytica
  CDS (22)..(621)
aaataaaaaaaaacatgacctatgagaccagtgaaacttgtcatcgtcggtgatggtgccgtcggtaaaacttgtatgttaatttcatatacaacaaatgctttcccaaatgaatatattccaacagtctttgaaaattataattcttcattggttgttgatgatgttaaaattaatcttggattatgggatactgctggacaagaagattatgatagattaagaccattatcatatccatcaactgatgtattccttgtttgtttctccgttattgctccagcttcatatgaaaatgttgaaggtaaatggaaaccagaaattgatcaacactgtccaaatgtaccaattattcttgttggaactaaaattgatattagagatgatccagaacaagttaaacgtttagctgaaaagaatattgtcccaattcaacctcctcaaggagatgaattagcaaagaaaattggtgctgttaaatatattgaatgttctgctttaacacaagccaatcttaaacttgtttttgaagaagctgttagagctgttcttgctaaagctgctaaagagccaactggaaagaaagaaaaaggaggtaagaaaggatgctcattattctaatttcactttttagttgataaattgaagaagttgttataaaagaaaatatatttgttttttgtaaaaaaatagaaaataaaagaagaaaaagattgatttaaa

SEQ ID NO: 332 - protein, 199 aa, Entamoeba histolytica
MRPVKLVIVGDGAVGKTCMLISYTTNAFPNEYIPTVFENYNSSLVVDDVKINLGLWDTAGQEDYDRLRPLSYPSTDVFLVCFSVIAPASYENVEGKWKPEIDQHCPNVPIILVGTKIDIRDDPEQVKRLAEKNIVPIQPPQGDELAKKIGAVKYIECSALTQANLKLVFEEAVRAVLAKAAKEPTGKKEKGGKKGCSLF

SEQ ID NO: 333 - DNA, 597 bp, Candida albicans
  CDS (1)..(597)
atggttaacggtccagctgaacttcgtagaaaattagtcattgtcggtgatggtgcttgtggtaagacttgtttattaattgttttttcaaaaggtactttcccagaagtttatgtcccaacagtttttgaaaattacgttgctgatgttgaagttgatggtagaaaagttgaattggcattatgggatactgctggtcaagaagattatgatagattaagaccattatcttatccagattctaatgttattttgatttgtttttcagttgattcaccagattctttagataacgttttagaaaaatggatttctgaagttttacatttctgtcaaggtgttccaatcattttagttggttgtaaatctgatttaagagatgatcctcatactattgaagccttgagacaacaacaacaacaaccagtctcaacttctgaaggccaacaagttgctcaaagaattggtgctgctgattacttggaatgttctgctaaaaccggtagaggtgttagagaagtgtttgaagctgctactagagcttctttaagagttaaagaaaagaaggaaaagaagaagaaatgtgttgtcttgtaa

SEQ ID NO: 334 - protein, 198 aa, Candida albicans
MVNGPAELRRKLVIVGDGACGKTCLLIVFSKGTFPEVYVPTVFENYVADVEVDGRKVELALWDTAGQEDYDRLRPLSYPDSNVILICFSVDSPDSLDNVLEKWISEVLHFCQGVPIILVGCKSDLRDDPHTIEALRQQQQQPVSTSEGQQVAQRIGAADYLECSAKTGRGVREVFEAATRASLRVKEKKEKKKKCVVL

SEQ ID NO: 335 - DNA, 1165 bp, Kluyveromyces lactis
  CDS (102)..(728)
aagtgtcataaaacagaattactcaagagttttcgaacagctttgattttataatacaataaaaaaaagtagtgatttgatttgttttaaccctttccataatgtctcaagctgttggtaatgttgccagcattagaagaaagctagttattgtcggtgatggtgcgtgtggtaagacttgtttattgattgttttcgccaagggtaagttccctcaggtttacgtgcccactgttttcgataattacgttgctgatgtcgaagttgacggtcgtcgcgtagaattggcgttgtgggatactgctggccaagaagattatgatagattgagaccactttcgtacccagattccaacgttgtgttaatctgttactcaattgatttgccagattccttagaaaacgtgatggaaaaatggatctctgaagttttacacttttgtcaaggtgttccaatcatcttggttggttgtaaagcagatttgagaaatgatcctcaagttgttgaagaactaagagctcaaggattacaacctgtgtctcaggctcaagcacaagaagtcgctgaccaaatcggtgctgttgactacatcgaatgttctgccaagaccggttacggtgtcagagaagtcttcgaggctgctacaagagcttctttggtcggtaaacaaggtaagagcaaacctaagactaagtctagcaaaaaaaagaagtgtgtcgtcttgtaaataaagacacgcacgccccaaacccactcttcacccccttatctccaacttcatttgaatttaccttgaaacagaggactgagctttgaggatattattattaggcgatgggaattgtttacaaccgttaattggcagaagtaaagatccaaaaaaaaagaagagggaagacgaacaaaccatattcatttgtttctaattgatcaatttttaatatacaaatgtcagcaattaatttccgttgaatttcctaattttttctcctcgttcttttctttgtttccatctggtttcaagtgaccatccctccctgacattttctcttctacctctcttctgttttgtgtgtttctacctataaattatttttatatacctacactcttttattttgtaagaaacttaaatattatcaccactatactgcactttctcat

SEQ ID NO: 336 - protein, 208 aa, Kluyveromyces lactis
MSQAVGNVASIRRKLVIVGDGACGKTCLLIVFAKGKFPQVYVPTVFDNYVADVEVDGRRVELALWDTAGQEDYDRLRPLSYPDSNVVLICYSIDLPDSLENVMEKWISEVLHFCQGVPIILVGCKADLRNDPQVVEELRAQGLQPVSQAQAQEVADQIGAVDYIECSAKTGYGVREVFEAATRASLVGKQGKSKPKTKSSKKKKCVVL

SEQ ID NO: 337 - DNA, 1181 bp, Schizophyllum commune
  CDS (139)..(759)
ctggtctctcgtcctttcttccaccacgcgcacgcgcacccacgtttcttctcccactcccggcgctgtcggccccgtcgccctcgcgtccttcctcttcctcttccgccagctcagtgacaggtacacactccccttatggcgctctgcggttcgtcgaaagggcgcggcaggggccgaccgatccagcgcaaggtcgtcgtatgcggcgacggcgcgtgcgggaagacgagtctgctgaacgtcttcacgagggggttcttcacgcaggtttatgaaccgacggtgttcgagaactacgtgcacgatctgtatatcgacgaccagctggtggagctgagtctctgggatacggcggggcaggaggagttcgaccggctacggagcctgtcgtatgcagaaacgcatgtgatcatgatatgcttcagcgtcgacaatccaacgtcgctcgagaatgtggagagcaagtggctcgacgagattttggagtactgtccgggcgtgaagttggtattggtcgactcaaaatgtgatctacgcgacgaccctgcagtactcgatcggctacaacgatacggtacacatacggatcaatatgaagagggcctcggggtcgcgcgaagaatacgagcttcacgatacttagagtgctcctccaaacacaaccggggcgttaacgaagtcttcttacgaggccgcgcgcgtgtcactgtccactcgatcaggcaggggagcgccgggtcgtgttgtgtcatgtagcgcacctcactctcgtcagtctagtcccccaagccgatcgacgctgcgctggcgctccccgtcgacctctcaaactgctctgccccactatgtcacaccaagcggcccatcgacccgtcctagaccacactacacaggtgttaggacgcaagagaactccagcgcggcccgccctcggtccccatgctcctgggcgtgtagtgcttcgtgcactcctgttcgtaggtgcgggggtactcctccccactcgtgcggtgctcaaggacgtgtagggggcagctcggtgcgctgtccgaataagatagatatatacccccccaccccgaaggtcacatacgcatggatatcttcacgctcaaatatgttacgctcccttaatctaactgcgtcttatatgggaattgaatgcgtttgatatgggc

SEQ ID NO: 338 - protein, 206 aa, Schizophyllum commune
MALCGSSKGRGRGRPIQRKVVVCGDGACGKTSLLNVFTRGFFTQVYEPTVFENYVHDLYIDDQLVELSLWDTAGQEEFDRLRSLSYAETHVIMICFSVDNPTSLENVESKWLDEILEYCPGVKLVLVDSKCDLRDDPAVLDRLQRYGTHTDQYEEGLGVARRIRASRYLECSSKHNRGVNEVFLRGRARVTVHSIRQGSAGSCCVM

SEQ ID NO: 339 - DNA, 618 bp, Schizosaccharomyces pombe
  CDS (1)..(618)
atgtcaagctgtttcggaagtaaaaagaagcctatttatcggaaaatcgtaattcttggtgatggtgctgctggtaaaaccagtttgttaaatgtatttactaagggttatttccctcaggtatacgagcctactatatttgaaaactacattcatgatatctttgtcgatggaaacagtatagaactgtctctatgggatacagctggtcaagaagagtatgatcaactgcgttcgttatcatattcagatacacatgttattatgatctgctttgccgtggattcacgagactcattagaaaatgtaatcacaaaatggcttccggaagtctctagtaattgccctggtgttaaattggttcttgttgctctaaaatgtgatttacgtggagctgatgaggagcaagttgatcacagtaaaattattgattacgaggaaggactggcagcggcaaaaaaaatcaacgctgtacgatatttagaatgcagcgctaaattaaatcgtggcgtaaatgaagctttcacggaagctgcacgcgttgcccttgccgcgcaaccaagaggtacaaaggatggtgctgatgaatcccatggtaccggatgtatcattgcttga

SEQ ID NO: 340 - protein, 205 aa, Schizosaccharomyces pombe
MSSCFGSKKKPIYRKIVILGDGAAGKTSLLNVFTKGYFPQVYEPTIFENYIHDIFVDGNSIELSLWDTAGQEEYDQLRSLSYSDTHVIMICFAVDSRDSLENVITKWLPEVSSNCPGVKLVLVALKCDLRGADEEQVDHSKIIDYEEGLAAAKKINAVRYLECSAKLNRGVNEAFTEAARVALAAQPRGTKDGADESHGTGCIIA

SEQ ID NO: 341 - DNA, 582 bp, Emericella nidulans
  CDS (1)..(582)
atggctgagatccgccgcaagcttgttatcgttggtgatggtgcctgcggtaagacctgtctgttgatcgtcttctcaaagggcactttccctgaggtctacgtccccaccgtctttgagaactacgttgccgatgttgaggttgatggcaagcacgtcgagctcgctctctgggatacggctggtcaagaagattacgaccgtctccgccctctctcctaccctgactcgcatgtcatcctgatttgcttcgctgtcgactcaccggattcccttgacaacgttcaagagaagtggatctctgaagtcctacacttctgccagggtctccccatcatcctcgtcggatgcaagaaggatcttcgccatgaccccaagacgatcgaggagctgaacaagacctctcagaagcctgtcacccccgaacagggtgaggaagtccgcaagaagattggcgcctacaagtacctcgagtgctctgctcgaaccaacgagggtgtccgtgaggtctttgaggctgccacgcgtgctgccctcttgaccaagacccacaagagcaagaagaagtgcagcatcctgtaa

SEQ ID NO: 342 - protein, 193 aa, Emericella nidulans
MAEIRRKLVIVGDGACGKTCLLIVFSKGTFPEVYVPTVFENYVADVEVDGKHVELALWDTAGQEDYDRLRPLSYPDSHVILICFAVDSPDSLDNVQEKWISEVLHFCQGLPIILVGCKKDLRHDPKTIEELNKTSQKPVTPEQGEEVRKKIGAYKYLECSARTNEGVREVFEAATRAALLTKTHKSKKKCSIL

SEQ ID NO: 343 - DNA, 1086 bp, Homo sapiens
  CDS (40)..(672)
cgcagccgcccgcccgcccgctcagcgcccggccccgggatgacggcggcccaggccgcgggtgaggaggcgccaccaggcgtgcggtccgtcaaggtggtcctggtgggcgacggcggctgcgggaagacgtcgctgctgatggtcttcgccgatggggccttccccgagagctacacccccacggtgtttgagcggtacatggtcaacctgcaagtgaaaggcaaacctgtgcacctccacatctgggacacagcagggcaagatgactatgaccgcctgcggcccctgttctaccctgacgccagcgtcctgctgctttgcttcgatgtcaccagcccgaacagctttgacaacatctttaaccggtggtacccagaagtgaatcatttctgcaagaaggtacccatcatcgtcgtgggctgcaagactgacctgcgcaaggacaaatcactggtgaacaagctccgaagaaacggattggagcctgtgacctaccacaggggccaggagatggcgaggtccgtgggcgcggtggcctacctcgagtgctcggctcggctccatgacaacgtccacgccgtcttccaggaggccgccgaggtggccctcagcagccgcggtcgcaacttctggcggcggattacccagggcttttgcgtggtgacctgagcggctcggggcgtcccagcgacgcgggaaggggcagggcgctgacctgctgctgagctggctgggctggacccggtccctaggctgtgaccgccgaactccactgcaacagacgggcgccaccaaagccaggccctgaggcctgggagtcctggactgagaaagggggttcctgggcccacctgctctgtgtagggctcgtcctgcggtgcccgagaatcactcgctaacccctatgcccggtcccggaccgacatcctggagccgcctgtgcagcctgatgccccctcgtggctgctcccagggctgcacctgccaggacctaatgttcttaggtccctctggccagaacccacacccggccccttcccacctgtcatactggtaactgtaacaagaaaaacgacatcactt

SEQ ID NO: 344 - protein, 210 aa, Homo sapiens
MTAAQAAGEEAPPGVRSVKVVLVGDGGCGKTSLLMVFADGAFPESYTPTVFERYMVNLQVKGKPVHLHIWDTAGQDDYDRLRPLFYPDASVLLLCFDVTSPNSFDNIFNRWYPEVNHFCKKVPIIVVGCKTDLRKDKSLVNKLRRNGLEPVTYHRGQEMARSVGAVAYLECSARLHDNVHAVFQEAAEVALSSRGRNFWRRITQGFCVVT

SEQ ID NO: 345 - DNA, 1166 bp, Mus musculus
  CDS (85)..(717)
gccgccgggccagccccgcgcccgccgcagccagcccgccgcgtaccgcctgctgctccgcgcaccgccgtccgccagccagggatgaacgcgtcccaggttgcgggagaagaggcgccgcagagcgggcactcggtcaaggtggtcctggtgggcgacgggggctgcgggaagacgtcactgatgatggtcttcgccaaaggggccttcccagagagctacagtcccacagtgtttgagcgctataatgccactctgcagatgaagggtaaacctgtgcacctccaaatctgggacacagccgggcaagatgactatgaccgcctccggcccttgttctatcctgatgccaatgtcttgctcctctgcttcgatgtgaccaatccaaacagctttgacaacgtctccaaccggtggtacccagaggtgacacatttctgcaagggagtgcccatcattgttgtgggctgcaagatagacctgcgtaaggacaaggtgctggtgaacaacctgcggaagaaaagactggagcccgtgacctaccacaggggccacgatatggcaaggtctgtgggagcggtggcctatcttgagtgttcagctcggctccatgacaacgtggaagcagtcttccaggaagcagcagaagtggctctcagcagtcgcagacataacttttggcggcggattactcagaattgttgcttggccacctgactggcttggaacccaccttgccaaccggtttactccgctgcagaaagacccagaagcagaacttgtactctgttgactgggatggacctaatccctaggctgagctggtagaaccacacatccatccacagatgggctccaatgaggcctggcccctggaaccgaatgaaacccggtaatgataggaaagaagtggtcccaagaacccttaagctctggaaaccaattaatagaacatcctgtgcccaaatcctgaacctgcgcctgaacggggtctgtgcggtctgtttggcgccaaccttgtggctaattctaattgaagttatatctacaggacctaagggttcccaagaaccaacttgcccgggctaataacctgcgccgtggctcaacaaccttaatttaatcccattgctaagtgtaacaactaaaatggcaagcacttgcta

SEQ ID NO: 346 - protein, 210 aa, Mus musculus
MNASQVAGEEAPQSGHSVKVVLVGDGGCGKTSLMMVFAKGAFPESYSPTVFERYNATLQMKGKPVHLQIWDTAGQDDYDRLRPLFYPDANVLLLCFDVTNPNSFDNVSNRWYPEVTHFCKGVPIIVVGCKIDLRKDKVLVNNLRKKRLEPVTYHRGHDMARSVGAVAYLECSARLHDNVEAVFQEAAEVALSSRRHNFWRRITQNCCLAT

SEQ ID NO: 347 - DNA, 735 bp, Sus scrofa
  CDS (1)..(735)
atgaaggagagaagagccagccagaaattatccagtaaatctatcatggatcctaatcagaacgtgaaatgcaagatagtagtggtgggagatagtcagtgtgggagaaccgcgctgctgcacgtcttcgccaaagactgcttccccgagaattacgtccctacagtgtttgagaattacacggccagtttcgaaatcgacacacaaagaatagaattgagcctgtgggacacttcgggttctccttactatgacaacgtccggcccctctcctacccagactcagacgccgtgctgatttgctttgacatcagtagaccagagactctggacagtgtcctgaaaaagtggaaaggtgaaatccaggagttttgtcccaacaccaaaatgctcttggtcggctgcaaatctgatcttcggacagatgtcagtacattagtagagctctcaaaccacaggcagacaccagtttcctacgaccagggggcaaatatggccaaacagattggagcagccacttacatcgaatgctcagctttacagtcagaaaatagcgtcagagacatttttcatgttgccaccttggcatgtgtaaataagacaaataaaaacgttaagcggaacaaatcgcagagggcaacaaagcggatttcacacatgcccagcagaccggaactctcggcagtggctacggacttacgaaaggacaaagccaagagctgcactgtgatgtga

SEQ ID NO: 348 - protein, 244 aa, Sus scrofa
MKERRASQKLSSKSIMDPNQNVKCKIVVVGDSQCGRTALLHVFAKDCFPENYVPTVFENYTASFEIDTQRIELSLWDTSGSPYYDNVRPLSYPDSDAVLICFDISRPETLDSVLKKWKGEIQEFCPNTKMLLVGCKSDLRTDVSTLVELSNHRQTPVSYDQGANMAKQIGAATYIECSALQSENSVRDIFHVATLACVNKTNKNVKRNKSQRATKRISHMPSRPELSAVATDLRKDKAKSCTVM

SEQ ID NO: 349 - DNA, 1017 bp, Homo sapiens
  CDS (30)..(665)
gccgccgccagtgctgcgggctccgggcaatggatgcccccggggccctggcccagaccgccgcccccggtccgggcaggaaggagctgaagatcgtgatcgtgggcgacggcggctgcggcaagacctcgctgctcatggtgtacagccagggctccttccccgagcactacgccccatcggtgttcgagaagtacacggccagcgtgaccgttggcagcaaggaggtgaccctgaacctctacgacacggccgggcaagaagactatgaccggctgcggcccctgtcctaccagaacacccacctcgtgctcatctgctatgacgtcatgaatcccaccagctacgacaacgtcctcatcaagtggttccctgaggtcacgcatttctgccgcgggatccccatggtgctcatcggctgcaagacagacctgaggaaggacaaggagcagctgcggaagctccgggccgcccagctggagcccatcacctacatgcagggcctgagcgcctgcgaacagatccgagctgctctctacctggaatgttccgccaagtttcgggagaatgtggaggacgtcttccgggaggccgccaaggtggctctcagcgctctgaagaaggcgcaacggcagaagaagcgccggctctgcctgctgctctgacccagggcagacagacctcacgacagcactgacagggcccgggggcccaggtgccgattgcaccagggaggctgccccatcccgaccctccagctcatggtgtctggggcctgcggctagactcttggaacattctggaactctctcctttcctggctggggctctgaccacaaactcccctccaggctgcccctgggacatggtggtgatgtgggtgcaggagccagtgtctgttgtcgggactcgcaagtgccctcatcacagccacccccaccacgagtgtctccccagtgcagactcaagttatgcttgaaatgaaaaagtctatctggtagtgggtaaaaaaaaaaa

SEQ ID NO: 350 - protein, 211 aa, Homo sapiens
MDAPGALAQTAAPGPGRKELKIVIVGDGGCGKTSLLMVYSQGSFPEHYAPSVFEKYTASVTVGSKEVTLNLYDTAGQEDYDRLRPLSYQNTHLVLICYDVMNPTSYDNVLIKWFPEVTHFCRGIPMVLIGCKTDLRKDKEQLRKLRAAQLEPITYMQGLSACEQIRAALYLECSAKFRENVEDVFREAAKVALSALKKAQRQKKRRLCLLL

SEQ ID NO: 351 - DNA, 684 bp, Mus musculus
  CDS (1)..(684)
atggaggggcagagtggccgctgcaagatcgtagtggtgggggacgcggagtgcggcaagacagcgttgctgcaggtgttcgccaaggacgcctaccccgggagttatgtccccacggtgtttgagaactacactgccagcttcgagatcgacaagcgccgcattgagctcaacatgtgggatacttcaggttcctcttactatgacaatgtccggcctctggcctacccggattctgatgctgtgcttatctgctttgacattagccggccagaaacactggacagtgtcctcaagaagtggcaaggagagactcaggagttttgccccaatgccaaggtggtgctggttggctgtaagctggacatgcggactgacctggccacactgagggagctatccaagcagagactcatccctgtcacacatgagcagggtactgtgctggccaagcaagtgggagctgtgtcctacgttgaatgttcctcccgatcttctgagcgcagtgtccgggatgtcttccatgtggccacagtggcttctctcggccgtggccataggcagctacgtcgtactgactctcgccggggactgcagcgatccactcaactgtcgggacggccagaccggggaaatgagggcgagatgcataaggatcgagccaagagctgtaacctcatgtga

SEQ ID NO: 352 - protein, 227 aa, Mus musculus
MEGQSGRCKIVVVGDAECGKTALLQVFAKDAYPGSYVPTVFENYTASFEIDKRRIELNMWDTSGSSYYDNVRPLAYPDSDAVLICFDISRPETLDSVLKKWQGETQEFCPNAKVVLVGCKLDMRTDLATLRELSKQRLIPVTHEQGTVLAKQVGAVSYVECSSRSSERSVRDVFHVATVASLGRGHRQLRRTDSRRGLQRSTQLSGRPDRGNEGEMHKDRAKSCNLM

SEQ ID NO: 353 - DNA, 576 bp, Brachydanio rerio
  CDS (1)..(576)
atgcagacgattaagtgtgtggtggtgggagacggtgcagtaggcaagacatgccttcttatttcttatacgacaaatgcctttccagaggagtacattcccacagtgtttgacaactacagtgctcagatgagtgtagatgggcgcactgtcagcctcaacctctgggacacggcagggcaggaggagtatgaccgtctgcgcacgctttcctacccacaaactaatgttttcatcatttgcttttccatcggaagcccttcatcattagctaatgttcgccacaagtggcacccggaggtgtctcaccactgtcccaacgtgccaattcttctagttggcaccaagaaggatctgcgttcagatacagagacaattaagaagttgaaggagcaagggcttgcaccctctactcaacagcagggtggcaccctgtgcaagcagatcaatgctgtgaggtatctggagtgctcggcgctccgccaggaaggcgtgcgggatgtgtttgtagatgctgttcgtgctgtgctctaccccatgaccaaaaagaataccaagaagtgtgttctcttatag

SEQ ID NO: 354 - protein, 191 aa, Brachydanio rerio
MQTIKCVVVGDGAVGKTCLLISYTTNAFPEEYIPTVFDNYSAQMSVDGRTVSLNLWDTAGQEEYDRLRTLSYPQTNVFIICFSIGSPSSLANVRHKWHPEVSHHCPNVPILLVGTKKDLRSDTETIKKLKEQGLAPSTQQQGGTLCKQINAVRYLECSALRQEGVRDVFVDAVRAVLYPMTKKNTKKCVLL

SEQ ID NO: 355 - DNA, 576 bp, Xenopus laevis
  CDS (1)..(576)
atgcagagcattaagtgtgtggtggtgggcgacggagcagtgggaaagacctgtttactcatctgcttcacaaccaacgccttccctaaggaatacatccccacagtgtttgataactacagcgcccagacggcagttgacgggaggacagttagcttgaacctgtgggacactgctggccaggaagagtatgacagactgcgtacactttcttacccacagaccaacgtcttcatcatttgcttttccatcgccagcccaacctcctatgagaatgtaaagcacaagtggtaccctgaggtgggtcaccattgtcccaacgtgcccattctcttggtgggcaccaagaaggatcttaggaacaacgcagatgtcataaagaagctgaaagagcagaaccaaatgcccatcactaaccatcagggtggaaatctggccaagcagatccatgcagtaaagtatatggagtgctcggcgctgaatcaagatggcatcaaggaagtgtttgcggatgctgtgcgagctgttctcaacccgactcccatcaaggacaaaaagagctgcttcattttgtga

SEQ ID NO: 356 - protein, 191 aa, Xenopus laevis
MQSIKCVVVGDGAVGKTCLLICFTTNAFPKEYIPTVFDNYSAQTAVDGRTVSLNLWDTAGQEEYDRLRTLSYPQTNVFIICFSIASPTSYENVKHKWYPEVGHHCPNVPILLVGTKKDLRNNADVIKKLKEQNQMPITNHQGGNLAKQIHAVKYMECSALNQDGIKEVFADAVRAVLNPTPIKDKKSCFIL

SEQ ID NO: 357 - DNA, 591 bp, Xenopus tropicalis
  CDS (1)..(591)
atggccgcgatacgcaagaagctggtggtggtcggggacggagcttgcggcaaaacctgcctcctcatcgtcttcagcaaggacgagttccccgaggtgtacgttcccaccgtgttcgagaactacgtggccgatatcgaggtggacgtgaagcaggtggagctggccctgtgggacacggcggggcaggaggactacgaccggctgcggcctctctcctaccccgacacggacgtcatcctcatgtgcttctccgtggacagcccggactcgctggagaacatcccggagaagtgggtgcccgaggtgaagcacttctgccccagcgtccccatcatcctggtggccaacaagaaggacctgaggaacgacgagcacgtccgcaacgagctggcccgcatgaagcaggagccggtccgcaccgaggacggcagggccatggccgtgaggattaacgccttcgagtacctggagtgctcggccaagaccaaggaaggggtccgggaggtgttcgaaacggccactagggcggcgctgcagaagaaacacggccggagcggtgaatgtatgagctgctgtaagctcctctga

SEQ ID NO: 358 - protein, 196 aa, Xenopus tropicalis
MAAIRKKLVVVGDGACGKTCLLIVFSKDEFPEVYVPTVFENYVADIEVDVKQVELALWDTAGQEDYDRLRPLSYPDTDVILMCFSVDSPDSLENIPEKWVPEVKHFCPSVPIILVANKKDLRNDEHVRNELARMKQEPVRTEDGRAMAVRINAFEYLECSAKTKEGVREVFETATRAALQKKHGRSGECMSCCKLL

SEQ ID NO: 359 - DNA, 735 bp, Xenopus laevis
  CDS (1)..(735)
atgaaggaaagaagaacgagtcagaaactggccagcaaatcaatgatggatcccaaccagaatgtgaaatgtaaaattgtggtggtgggggacagccagtgtggcaaaactgccctgctccatgtctttgccaaggactccttcccagagaactatgtccccaccgtatttgagaattacacggccagttttgaaattgacacgcagaggatagaactgagtctctgggatacatctggttccccttattatgacaacgtccgacctcttagctatccagactctgacgccgttttgatatgtttcgatatcagtcgccccgagacgcttgacagtgttcttaaaaagtggaaaggtgaaattcaagaattctgccccaataccaaaatgctgctggttggctgcaaatccgacctccgtacagatctaaccacattagtagaactatctaaccacagacagacgccagtctcctatgatcagggggcaaacatggccaagcagataggagcagccacgtacatcgaatgctctgcgttacagtctgagaacagtgtcagagacattttccatgtagccaccctggcatgtgtgaataagactaacaaaaatcttaaaaggaataaaactcaaagagccacaaagagaatctcgcacatgccgagtcggccagaactaagtgctgtggccacagacttgaggaaggataaagcaaagagctgcagcatcatgtga

SEQ ID NO: 360 - protein, 244 aa, Xenopus laevis
MKERRTSQKLASKSMMDPNQNVKCKIVVVGDSQCGKTALLHVFAKDSFPENYVPTVFENYTASFEIDTQRIELSLWDTSGSPYYDNVRPLSYPDSDAVLICFDISRPETLDSVLKKWKGEIQEFCPNTKMLLVGCKSDLRTDLTTLVELSNHRQTPVSYDQGANMAKQIGAATYIECSALQSENSVRDIFHVATLACVNKTNKNLKRNKTQRATKRISHMPSRPELSAVATDLRKDKAKSCSIM

SEQ ID NO: 361 - DNA, 1035 bp, Pagrus major
  CDS (25)..(603)
cggcacgaggcgcagcggaacaggatgcaggctatcaaatgtgtggtcgtgggagatggagctgtgggaaaaacatgtcttctcatcagctacacaaccaatgccttccccggggagtacattcctactgtatttgacaactactcagctaatgtgatggtggacagcaagccagtcaacctgggcctctgggatacagctggacaggaagactacgacaggctccgcccactgtcctacccacagacggatgttttcctgatctgtttctccctggtgagcccagcgtcctatgagaacgtcagagctaagtggtacccagaggttcgccaccactgcccctccacacctatcatcctggtgggcaccaagctggatctgagggacgagaaggaaaccattgagaagctgaaggaaaaaaagctggcgccgatcacctacccccagggcctggctctggctaaggagatcgatgcagtgaagtacctggagtgctcagccttgacccagcgtggcctgaagaccgtgttcgacgaggccatccgggccgtgctctgccctcagcccaccaaggtcaagaagaagccgtgctcactgctgtaaatgattcttgcaagacgaagacgacgacgatgagaaagcgtttgcgactgatgaaaaggtgaaaagaagacgatgggaaagttctgttatgtttaatggtttgtgatagaagactgcgactagatttccactaggttagaaaaaaataatgcttgtgcggtgatgataaatggtaaatggtagcaaaccctttctgtacagcatactctgagactgattattcaagtgcattatagaccaggcagacatttcactgtaaaattgaacaaagtatatcactagatgtggaggctgacacactgtacattcatcctgtgggcttaaatggtcagatcaagagcagcaaagcacctgcacaacggactctgctgtcccttttggggctgacagtatgtacacaggtgtcttgtgcggcttcacataatgataata

SEQ ID NO: 362 - protein, 192 aa, Pagrus major
MQAIKCVVVGDGAVGKTCLLISYTTNAFPGEYIPTVFDNYSANVMVDSKPVNLGLWDTAGQEDYDRLRPLSYPQTDVFLICFSLVSPASYENVRAKWYPEVRHHCPSTPIILVGTKLDLRDEKETIEKLKEKKLAPITYPQGLALAKEIDAVKYLECSALTQRGLKTVFDEAIRAVLCPQPTKVKKKPCSLL

SEQ ID NO: 363 - DNA, 1090 bp, Schizophyllum commune
  CDS (145)..(735)
gctgctcgccttgttcttccattgtccatccccttgcccgtgctcccgcggtcgctgaacgtacccaagccctcgcctccccgtcgcgtcgtctgccttcttcccctcggtttccgatagtcgctccgttgcccagtccccagtatgcaggccatcaagtgtgttgtcgtaggagatggtgcggtcggaaagacctgcctgctaatctcgtataccacgaacgcgttcccgggagaatatatcccgaccgtgttcgataactactccgccaatgtcatggtcgacggcaagactatctccctcgggctttgggataccgctggtcaagaagattacgaccgtctccgcccgctctcctaccctcagacggatgtcttcttgatttgtttctcgctcgtcagcccgccaagtttcgagaacgtccggaccaagtggtaccctgaaatatcgcatcacgcaccgcagacgcccgtcgtgctcgtgggcaccaagctggatttgcgagaggaccctgcgacgatagagaaactgcgtgaccgccgcatgtcccccatccagtactcgcagggtgtcgcgatgatgaaggacatcggtgctgtgaagtacctagagtgttccgcgctgacgcaaaaggggctcaagaccgtgtttgacgaggcgatccgtgttgtcttgtacccgtccgcgcggtccgacaacaaacgcagcaagggccgctcatgcattgtcgcataagtggactccagcgccgctgtatgggtggacgaaccacaggaagtgttgtgcgcactgtatcatcacgcggcgcgcggcgctccctgcactatatcacgccatttatgtctttcttctagcactatctcctttttcgcgccagctgctgatatccgcacggtttcctgccaacacataccagtggaactcgaggatcctgaccattttgctactcgtcacgaccacccttgcctcacaccccctttgtgttgactctcaggttctgtaattcgacgacctgctcttcgaatttcgctcccctttgcccacatagcacatatagtatcaccgtgacgaactgtatcctccttgacga

SEQ ID NO: 364 - protein, 196 aa, Schizophyllum commune
MQAIKCVVVGDGAVGKTCLLISYTTNAFPGEYIPTVFDNYSANVMVDGKTISLGLWDTAGQEDYDRLRPLSYPQTDVFLICFSLVSPPSFENVRTKWYPEISHHAPQTPVVLVGTKLDLREDPATIEKLRDRRMSPIQYSQGVAMMKDIGAVKYLECSALTQKGLKTVFDEAIRVVLYPSARSDNKRSKGRSCIVA

SEQ ID NO: 365 - DNA, 576 bp, Paracoccidioides brasiliensis
  CDS (1)..(576)
atggctgagattcgtcgtaaacttgtcattgttggtgatggtgcctgtggtaaaacttgtctcttgattgtcttttccaagggtaccttccctgaggtctacgtcccaaccgtcttcgagaactatgtggccgacgttgaggtcgatggaaagcatgtcgagctcgcactttgggatacggctggccaggaagattacgatcgactcagacctctttcctaccctgattcacatgttattctgatctgtttcgctatcgattcccccgactctctcgacaacgtccaggagaagtggatttctgaagtccttcatttctgccagggtcatcccattatcctcgttggttgcaagaaagatcttcgtgacgaccccagaacgattgaggagctgcgcaagacgtctcagaagcccgtgaccaccgaacagggtgaggaggtccgcaagaagattggcgcttacaagtatctggaatgctccgcccgaacaaacgacggagttcgtgaggtgttcgagtcagctactcgagctgcactgctggcgaagaaggagaaaaagaaatgcaagatcttgtaa

SEQ ID NO: 366 - protein, 191 aa, Paracoccidioides brasiliensis
MAEIRRKLVIVGDGACGKTCLLIVFSKGTFPEVYVPTVFENYVADVEVDGKHVELALWDTAGQEDYDRLRPLSYPDSHVILICFAIDSPDSLDNVQEKWISEVLHFCQGHPIILVGCKKDLRDDPRTIEELRKTSQKPVTTEQGEEVRKKIGAYKYLECSARTNDGVREVFESATRAALLAKKEKKKCKIL

SEQ ID NO: 367 - DNA, 591 bp, Fucus distichus
  CDS (1)..(591)
atgcagaacataaagtgcgtcgtcgtgggtgacggtgcggttggtaaaacctgcctcctcatctcctacacgacgaacgcgtttcctggggaatacatcccaactgtcttcgacaactatagcgctaatgtaatggtcgacggaaagccgatcaacctgggcctttgggatactgcagggcaggaagattacgatcgactccggccactgagctacccgcaaacggacgtatttcttgtgtgcttcagcgtcgttgaccccaccagctttcacaacgtgaagctcaagtggatacccgagctgcaacaccatgctccgggcatcccatttatactggttggtacgaagctcgacctgagggatgatcaagacgcgatcaagcgtctagcagaacgtcggcagacgcccatcagcttcagcgaggcgcagggtctgtcgtctgaccttgaagcttaccgctaccttgagtgcagcgcgctgacgcaacacgggttaaaacaggtgtttgacggggctatccggtgtgttctagaacagaaccagagaaagatgaaaaagaaaaagggcaagaaaggctgcgtcatctcttga

SEQ ID NO: 368 - protein, 196 aa, Fucus distichus
MQNIKCVVVGDGAVGKTCLLISYTTNAFPGEYIPTVFDNYSANVMVDGKPINLGLWDTAGQEDYDRLRPLSYPQTDVFLVCFSVVDPTSFHNVKLKWIPELQHHAPGIPFILVGTKLDLRDDQDAIKRLAERRQTPISFSEAQGLSSDLEAYRYLECSALTQHGLKQVFDGAIRCVLEQNQRKMKKKKGKKGCVIS

SEQ ID NO: 369 - DNA, 636 bp, Homo sapiens
  CDS (1)..(636)
atgcaggccatcaagtgtgtggtggtgggagacggagctgtaggtaaaacttgcctactgatcagttacacaaccaatgcatttcctggagaatatatccctactgtctttgacaattattctgccaatgttatggtagatggaaaaccggtgaatctgggcttatgggatacagctggacaagaagattatgacagattacgccccctatcctatccgcaaacagttggagaaacgtacggtaaggatataacctcccggggcaaagacaagccgattgccgatgtgttcttaatttgcttttcccttgtgagtcctgcatcatttgaaaatgtccgtgcaaagtggtatcctgaggtgcggcaccactgtcccaacactcccatcatcctagtgggaactaaacttgatcttagggatgataaagacacgatcgagaaactgaaggagaagaagctgactcccatcacctatccgcagggtctagccatggctaaggagattggtgctgtaaaatacctggagtgctcggcgctcacacagcgaggcctcaagacagtgtttgacgaagcgatccgagcagtcctctgcccgcctcccgtgaagaagaggaagagaaaatgcctgctgttgtaa

SEQ ID NO: 370 - protein, 211 aa, Homo sapiens
MQAIKCVVVGDGAVGKTCLLISYTTNAFPGEYIPTVFDNYSANVMVDGKPVNLGLWDTAGQEDYDRLRPLSYPQTVGETYGKDITSRGKDKPIADVFLICFSLVSPASFENVRAKWYPEVRHHCPNTPIILVGTKLDLRDDKDTIEKLKEKKLTPITYPQGLAMAKEIGAVKYLECSALTQRGLKTVFDEAIRAVLCPPPVKKRKRKCLLL

SEQ ID NO: 371 - DNA, 576 bp, Pneumocystis carinii
  CDS (1)..(576)
atgcaaactattaaatgtgtcgttgttggggatggcgcggttggtaaaacgtgtcttttaatatcctatacgacaaacaaatttccttcagaatatgttcctactgtatttgataattatgcggttaccgtaatgattggagaagaaccttatactttaggactttttgatacagcaggtcaagaagattatgacagattgcgtcccttatcatatccacaaacggatgtttttcttatttgcttttctgttactagtccagcaagttttgaaaatgtaagagaaaagtggcatccagaggttcgtcatcattgtccaggaacaccctgtcttattgttggtacacaaatcgatttacgagatgatcctatgattgtagagaaactcagtcgacaaagacaaacccccattacaaaagaattaggtgaaaaactttcaaaagaattgggtgctgtaaaatatgttgagtgctcagctttgactcaaaaaggattaaaaaacgtttttgatgaagctatagtttgcgcacttgaaccacccgttacgaagaagaaaactaaatgtcttattttataa

SEQ ID NO: 372 - protein, 191 aa, Pneumocystis carinii
MQTIKCVVVGDGAVGKTCLLISYTTNKFPSEYVPTVFDNYAVTVMIGEEPYTLGLFDTAGQEDYDRLRPLSYPQTDVFLICFSVTSPASFENVREKWHPEVRHHCPGTPCLIVGTQIDLRDDPMIVEKLSRQRQTPITKELGEKLSKELGAVKYVECSALTQKGLKNVFDEAIVCALEPPVTKKKTKCLIL

SEQ ID NO: 373 - DNA, 630 bp, Ashbya gossypii
  CDS (1)..(630)
atggcgtaccagacaggcggcaacatacgcaagaagttggttattgtcggcgacggggcgtgtgggaagacgtgtctgctcgttgtgttctccaaagggcagttcccggagatccatgtgcccacggtgttcgagaactacgtggcagatgtggacatcgacgggcgacgcgtagagctggcactgtgggatacagcgggccaggaggactacgaccggctgcggccattgtcgtacccggattccaatgtggtgcttatctgtttctctgtggacctacctgactcgctggacaatgtgcaggagaagtgggtcagcgaagttctgcacttctgccagggcgtgccaattttactggtaggctgcaaggtggatctgagaaacgaccctcaggtgctccagcagctgcaggccgagggccagcgccccgtgaccgccgcagagggctcagccgtcgccggtaagataggcgccgtcgcctacctcgagtgctctgcgcgcacaggccagggtgtgaaggaggttttcgacactgcgacccgcgccgcactctctggcaagcccgccgcgtctgcaggcaagaagaaggtccacggtgacaagaagaagaagaaatgtctggtcctgtga

SEQ ID NO: 374 - protein, 209 aa, Ashbya gossypii
MAYQTGGNIRKKLVIVGDGACGKTCLLVVFSKGQFPEIHVPTVFENYVADVDIDGRRVELALWDTAGQEDYDRLRPLSYPDSNVVLICFSVDLPDSLDNVQEKWVSEVLHFCQGVPILLVGCKVDLRNDPQVLQQLQAEGQRPVTAAEGSAVAGKIGAVAYLECSARTGQGVKEVFDTATRAALSGKPAASAGKKKVHGDKKKKKCLVL

SEQ ID NO: 375 - DNA, 564 bp, Ashbya gossypii
  CDS (1)..(564)
atgacggtcaacgttgtgagacggaagttggtaatcataggggatggggcatgcggcaagacgtcgttactacatgtgttcacgctggggaagttccctgaggaatatctgcccacggttttcgagaactacgttacggattgccgtgtagacggcataaaagtgcagttggcgctatgggatactgctggtcaggaagaatacgagcgtctgcgccccatgtcctactcgaaggcggacatcatattaatcgggtttgccatagacgacccggggtcgttgtccaatgcgcgggagaagtggacggtcgaggcgctgcgctactgtcccaacgccccgatcatcctcgtggggctcaaaaaggaccttcgccgccccgggacgcagtgcgcgatggtagcgccttcgcaggcacaagaggtggtgcgcgccatcggcgcaaagaaatacatggagtgcagcgcacttacgggggagggcgtggacgatgtgttcgagctggccacgagaacaagtcttctggtgaacaaggagccgggtcaaggctgttgcattatctcatga

SEQ ID NO: 376 - protein, 187 aa, Ashbya gossypii
MTVNVVRRKLVIIGDGACGKTSLLHVFTLGKFPEEYLPTVFENYVTDCRVDGIKVQLALWDTAGQEEYERLRPMSYSKADIILIGFAIDDPGSLSNAREKWTVEALRYCPNAPIILVGLKKDLRRPGTQCAMVAPSQAQEVVRAIGAKKYMECSALTGEGVDDVFELATRTSLLVNKEPGQGCCIIS

SEQ ID NO: 377 - DNA, 1043 bp, Tigriopus japonicus
  CDS (264)..(842)
aggaggagacgccttgtttgaaatccatccaacaacctgggactctctgctccagcagcaagcatcaccacccccatcaccatcatcttcatcctgatcaacacccttgagatccagatccccatccatcgatccacccatcctgaggattgactcacacacctcgaagattgtgggctgtgaaaaaccagtgtgggatcggcccttgcgtgcgtgaggtgggtggttgttgaaacccgactggcctgaccattgtcgtctcgatggcggctattcgcaagaaattagtgattgtgggcgatggcgcctgcggcaagacctgcctcttgatcgtgttctccaaggatcaattccccgaggtgtatgtgcccacagtgttcgaaaactacgtggctgacatcgaagtggacggcaagcaagtggaactggccttgtgggatacggccggtcaggaggactacgatcgactccgacccctgtcctatccggatacggatgtgatcctgatgtgtttctcgatcgactcgcccgattcgctcgagaacatccctgagaagtggacgcccgaagtcaaacacttctgccctaatgtgcccattatcctcgtgggaaacaaaaaagacttgcgcaatgatcccaataccatcaaggagttgggcaagatgaaacaagaaccggtcaagccggaagagggtcgcacaatggccgaaaagatcaacgccttcgcctacctcgagtgttcggccaagagcaaggaaggcgtcagagaagtctttgagacagccacccgagcggcattacaggtcaagaagaaaaagaagaagccttgcgttctcttttaatgtcggaaaccaaaccatttttcctattcttattacctatcttcatcatcaacatcaacatccttcaaccacaaatacaactacaactattactatacttctactactatggacgcgatcttaatttagtcgcaattatcaattggggaaatttacggaataaaacagaccctgagaacaaaaaaaaaaaaaaaaaaaaaa

SEQ ID NO: 378 - protein, 192 aa, Tigriopus japonicus
MAAIRKKLVIVGDGACGKTCLLIVFSKDQFPEVYVPTVFENYVADIEVDGKQVELALWDTAGQEDYDRLRPLSYPDTDVILMCFSIDSPDSLENIPEKWTPEVKHFCPNVPIILVGNKKDLRNDPNTIKELGKMKQEPVKPEEGRTMAEKINAFAYLECSAKSKEGVREVFETATRAALQVKKKKKKPCVLF

SEQ ID NO: 379 - DNA, 1014 bp, Rhopalosiphum padi
  CDS (197)..(772)
tcaattgcgttctgccatttttttctaccgacgtcgatccgcgcgtgttgatctgccgggtacactccgtacacaggttggagatcgctgcaggcagcgttcgattgcgacaacgacgaccagcgagaacacttctctagtgctctgtgctgcttattcaccagtgtacacgtaggagtgttcccatagcggcaacatgcagaccatcaagtgcgttgttgttggtgatggagctgtcggtaagacttgtctgctcatatcgtacacaacaaacaaatttccttcagaatatgtaccgactgttttcgacaattatgcagtgacagttatgattggtggggaaccatacacattaggtttatttgatacagcaggtcaggaagattatgatcgcctcagacctttgagttatccacaaactgatgtgtttcttgtttgtttctctgtggttttaccatcttcatttgaaaatgtcaaagaaaaatgggttccggagataacgcatcactgtcaaaaaacaccattcctgttggttggcacacaaatagaccttagagaagatgccacaactgtggagaaactagccaaaaataaacaaaaatcaatatcatttgaacaaggagagaagctagctaaagaacttaaagctgtgaaatatgtcgaatgctcagcacttacacaaaaaggactaaaaaatgtatttgatgaagctattcttgcagctttagagcctcctgaaccagttaagaagaggaagtgtgttatattgtaaggctgcggataaataaacaggtgcgacaattatgtcataaaaatatttaagataaaacaatttaaatcatgatttagcatggatacaataatgaaataataattattttgtttttactaatctataaatatatatatataaataatttattttatattttacaagaaaatatgtgcattcattgaataataaataaataggttttttatacgccaaaaaaaaaaaaaaaaaaaaaaaaaaaa

SEQ ID NO: 380 - protein, 191 aa, Rhopalosiphum padi
MQTIKCVVVGDGAVGKTCLLISYTTNKFPSEYVPTVFDNYAVTVMIGGEPYTLGLFDTAGQEDYDRLRPLSYPQTDVFLVCFSVVLPSSFENVKEKWVPEITHHCQKTPFLLVGTQIDLREDATTVEKLAKNKQKSISFEQGEKLAKELKAVKYVECSALTQKGLKNVFDEAILAALEPPEPVKKRKCVIL

SEQ ID NO: 381 - DNA, 679 bp, Hordeum vulgare var
  CDS (14)..(655)
cgcgcggcgagccatggcgtccagcgcctcccggttcatcaagtgcgtcacggtgggcgacggcgccgtcggcaagacctgcatgctcatctgctacaccagcaacaagttccccaccgactacatacccacggtgttcgacaatttcagcgcgaacgtggtggcggacggcaccacggtgaatttgggcctttgggacaccgccgggcaggaggattacaaccggctgaggcctctaagctaccgcggcgccgacgttttcgtgcttgccttctcccttgtgagccgagctagctatgagaatatcatgaagaagtggataccggagcttcagcattacgcgcccggcgtacctgttgtgctggtaggcacaaaactggatcttcgtgaagataagcactatttgctggaccaccctgggatgatacccgttaccacagcacagggggaggaacttcgtaagcaagttggtgctttatattacatagagtgcagctcaaagacacaacagaatgtcaaagctgtgtttgatgctgctatcaaggtagtaatccagcccccaactaaacaaagagaaaagaagaaaaagaaacagcgtcggggatgttctatgatgaacttcagcggaaggaaaatgctatgcttcaaatcctgaatgatgaaagagaaggttccttgc

SEQ ID NO: 382 - protein, 213 aa, Hordeum vulgare var
MASSASRFIKCVTVGDGAVGKTCMLICYTSNKFPTDYIPTVFDNFSANVVADGTTVNLGLWDTAGQEDYNRLRPLSYRGADVFVLAFSLVSRASYENIMKKWIPELQHYAPGVPVVLVGTKLDLREDKHYLLDHPGMIPVTTAQGEELRKQVGALYYIECSSKTQQNVKAVFDAAIKVVIQPPTKQREKKKKKQRRGCSMMNFSGRKMLCFKS

SEQ ID NO: 383 - DNA, 762 bp, Hordeum vulgare var
  CDS (33)..(689)
ggatccgctggagaggagaggagaggagagacatgagcggcggagcgggggcggcgacggcggtgagcaggttcatcaagtgcgtggccgtgggcgacggcgccgtgggcaagacctgcatgctcatctgctacacctgcaacaagttccccaccgactacatccccaccgtgttcgacaacttcagcgccaatgtctccgtggacgggagcatcgtcaacctcggcctctgggacaccgcaggtcaggaggattacagcaggctgaggcctctgagctacaggggagccgatgtcttcatcctctccttctccctcaccagcagagcaagctatgagaatgtgcacaagaagtggatgccggagcttcgccggtacgcccccggcattcctgtactgcttgttggaaccaagttggatctccgggaggatagagcttatcttgctgatcatgcagctgattccatcataacaactgagcagggtgaggatcttaggagacaaataggtgctgtggcatacatagaatgcagctccaagacacaaaggaacattaaggctgttttcgacaccgcaatcaaggcggttcttcaacctcaaaggcacaaggaggtagccagaaaggaaactcggacacgctctagtcggtcagtaaggcagtacttctgtgggagttcttgtttcgcgtagccgagaagaacattctggagtctttcctcgacacgatgctcagatggcccgtggttgttctccaaatggggta

SEQ ID NO: 384 - protein, 218 aa, Hordeum vulgare var
MSGGAGAATAVSRFIKCVAVGDGAVGKTCMLICYTCNKFPTDYIPTVFDNFSANVSVDGSIVNLGLWDTAGQEDYSRLRPLSYRGADVFILSFSLTSRASYENVHKKWMPELRRYAPGIPVLLVGTKLDLREDRAYLADHAADSIITTEQGEDLRRQIGAVAYIECSSKTQRNIKAVFDTAIKAVLQPQRHKEVARKETRTRSSRSVRQYFCGSSCFA

SEQ ID NO: 385 - DNA, 721 bp, Hordeum vulgare
  CDS (38)..(676)
gtggaggcgcggcgagagcggcggaggcggaggagagatgagcgtgaccaagttcatcaagtgcgtcacggtgggggacggcgccgtcggcaagacctgcatgctcatctgctacaccagcaacaggttccccagtgattacatccccacggtgttcgacaacttcagcgccaacgtctccgtcgacggcaacatcgtcaacctcggcctatgggacaccgccgggcaagaagactacagccggctgaggccgctgagctacagaggcgccgacgtgttcgtgctcgccttctccctcatcagcagcgccagctacgagaatgttcttaagaagtggatgccagagctccgccggttcgcgccgaatgtccccattgttcttgttgggaccaagctagatctgcgtgaccacagagcctacctcgccgaccaccccggtgcttcagcaatcacaactgcacagggtgaagaacttaggaagcagatcggcgccgcggcttacatcgagtgcagctccaagacacagcagaacgtcaaggctgtgtttgacaccgccataaaggtggtcctccagccgccgaggagaagggaggtgatgtccgccaggaagaaaaccaggcgaagctctggatgctccatcaagcacttgatctgcgggagtacgtgcgctgcttgaattagcaccatggaggcctggactgactatggagatgaagcatgg

SEQ ID NO: 386 - protein, 212 aa, Hordeum vulgare
MSVTKFIKCVTVGDGAVGKTCMLICYTSNRFPSDYIPTVFDNFSANVSVDGNIVNLGLWDTAGQEDYSRLRPLSYRGADVFVLAFSLISSASYENVLKKWMPELRRFAPNVPIVLVGTKLDLRDHRAYLADHPGASAITTAQGEELRKQIGAAAYIECSSKTQQNVKAVFDTAIKVVLQPPRRREVMSARKKTRRSSGCSIKHLICGSTCAA

SEQ ID NO: 387 - DNA, 699 bp, Hordeum vulgare
  CDS (67)..(660)
  MISC_FEATURE (55)..(55): n is a, t, g, or c
ggatcccgattccatcaggaaagcatatagactagcccagtaaatagaaataagnaaagatcggcgatgagcgcatctcggttcatcaagtgcgtgacggtgggggacggcgccgtgggaaagacatgcctcctcatctcatacacatccaacaccttccccacagactatgtcccaacagttttcgacaacttcagcgctaacgtcgtggttgacggcagcaccgtcaacctcggattatgggatactgcaggacaagaagactataatcgactacgcccactaagctaccgtggtgccgatgtcttcctgctcgccttttctctcatcagcaaagcaagctacgagaatgtcactaagaagtggattccagagttacggcactatgctcctggcgtgcccataattcttgttggaacaaagcttgatctgcgggatgacaagcagttttttgtggatcaccctggggcggttcctatttccactgctcagggtgaagagctgaagaaggtgattggcgcgactgcctacatcgagtgcagctcaaaaacacagcagaacatcaaggcggtgtttgatgcggcgatcaaggtggtcctccagcctccgaagcagaagcggaagaagaggaagtcacagaaaggatgcagcatcttgtaaagctaaaatcccttttgttttgcagtgtctcgcgtcgac

SEQ ID NO: 388 - protein, 197 aa, Hordeum vulgare
MSASRFIKCVTVGDGAVGKTCLLISYTSNTFPTDYVPTVFDNFSANVVVDGSTVNLGLWDTAGQEDYNRLRPLSYRGADVFLLAFSLISKASYENVTKKWIPELRHYAPGVPIILVGTKLDLRDDKQFFVDHPGAVPISTAQGEELKKVIGATAYIECSSKTQQNIKAVFDAAIKVVLQPPKQKRKKRKSQKGCSIL

SEQ ID NO: 389 - DNA, 677 bp, Hordeum vulgare
  CDS (27)..(668)
ggatccttctcgtccatttagccggcatggcgtccagcgcctcccggttcatcaagtgcgtcaccgtcggggacggcgccgtcggcaagacctgcatgctcatctgctacaccagcaacaagttccccaccgactacgtgcccaccgtgttcgacaatttcagcgcgaacgtggtggtggacggcaccaccgtgaacctgggcctctgggacactgcagggcaggaggactacaacagattgagaccgctgagctaccggggagccgacgtcttcgtgctctccttctcgctcgtcagccgagccagctacgagaatgtcatgaagaagtggctaccggagcttcagcaccatgcacccggcgtgccaacagtgctggttggtacaaagctagatctacgtgaagacaagcaatacttacttgaccaccccggcgtggtgcctgttactacagctcagggggaggaactccgcaagcacatcggtgcaacttgttatgtcgaatgcagctcaaagacacagcagaatgtcaaagctgtgtttgatgctgccatcaaggtagtgatcaaacctccaacaaagcagagggaaaggaggaagaagaaagcacggcaaggatgtgcatcattgggtaccctgtcaagaaggaagctggcatgcttcaagtgatcagtcgac

SEQ ID NO: 390 - protein, 213 aa, Hordeum vulgare
MASSASRFIKCVTVGDGAVGKTCMLICYTSNKFPTDYVPTVFDNFSANVVVDGTTVNLGLWDTAGQEDYNRLRPLSYRGADVFVLSFSLVSRASYENVMKKWLPELQHHAPGVPTVLVGTKLDLREDKQYLLDHPGVVPVTTAQGEELRKHIGATCYVECSSKTQQNVKAVFDAAIKVVIKPPTKQRERRKKKARQGCASLGTLSRRKLACFK

SEQ ID NO: 391 - DNA, 565 bp, Nicotiana tabacum
  CDS (71)..(565)
ctttttccaatttcaactccataaaactaagaagctagtgttcttctttcttatctttctaattgatgagatgaatactagtagtagtgccagtaatagtgcttctactgcaacaggaacaaagttcatcaaatgtgtgacagttggagatggtgctgttggcaagacttgccttctcatctcctacactagctgccttctcatctcctacactagcaacacttttccaactgattatgtgccaactgtttttgacaatttcagtgctaatgtcaatgttgatgggaagattgtgaatttgggtctttgggatactgctggtcaagaggattataacaggcttaggcctcttagttatcgaggagctgacgtcttcttgcttgcattctctctcataagtaggcctagctttgaaaatatatcaaaaaagtgggttcctgagctaagacattatgccccatcagtgcctattgttcttgtggggactaaattggatttaagagaggacaagcagtttagaagggactaccctggtgcatctacaatttcaacagaacagggctag

SEQ ID NO: 392 - protein, 164 aa, Nicotiana tabacum
MNTSSSASNSASTATGTKFIKCVTVGDGAVGKTCLLISYTSCLLISYTSNTFPTDYVPTVFDNFSANVNVDGKIVNLGLWDTAGQEDYNRLRPLSYRGADVFLLAFSLISRPSFENISKKWVPELRHYAPSVPIVLVGTKLDLREDKQFRRDYPGASTISTEQG

SEQ ID NO: 393 - DNA, 1057 bp, Nicotiana tabacum
  CDS (176)..(808)
ggcacgagaagctattaattccaagctatctccacaccctctccccaaacaagaaaattattaaatgtaaaacgtactactagacccccagttacatacataaacacacatcatctgcagaattttggtatgcaattttacgtactttcttgaggtatttttttttttatgttcaatggcctcaagtgcttcaagattcatcaaatgtgtcacggttggtgatggtgccgttggaaagacttgtatgcttatttgctataccagtaacaagttccccactgattatgttcccacagtgtttgacaacttcagtgccaatgtggttgtcgaagggaccacagtaaatttaggtctttgggatactgcaggccaagaagattataacagattaaggccactgagctaccgaggagcagatgtttttgtcctagcgttctccttggttagtcgcgcaagctacgagaacatacttaaaaagtggattcctgaacttcagcattatgctcctggaataccggtggtattagctggcaccaaacttgatcttcgtgaggataagcacttcttggctgatcatcctggattagttcctgtcaccaccgcgcagggagaggagctacggaaacaaattggtgctgcctattacatcgaatgtagctctaaaacacaacagaatgtgaaagctgtctttgatgctgcaatcaaggtcgtcatcaagccaccgcagaagcaaaaggagaagaagaaacaacgtcgaggatgtctcatgaatgtgatgtgcggaaggaagctcgtttgtttgaagtgacatttcaatgtacatatttcccatctgttcggcctctaacatgatttatatccatggctttagcgtgctgcctataaaacttacatttctatcagaacttttgtgacgagcataatgtatttgtttttccataacccaacttactgctggacggccttgatttgtctgtaaaatacgttacttgctaggtttatatttcaagtacatgtattaattctattaaaccaacaaaaaaaaaaaaaaaaaaaa

SEQ ID NO: 394 - protein, 210 aa, Nicotiana tabacum
MASSASRFIKCVTVGDGAVGKTCMLICYTSNKFPTDYVPTVFDNFSANVVVEGTTVNLGLWDTAGQEDYNRLRPLSYRGADVFVLAFSLVSRASYENILKKWIPELQHYAPGIPVVLAGTKLDLREDKHFLADHPGLVPVTTAQGEELRKQIGAAYYIECSSKTQQNVKAVFDAAIKVVIKPPQKQKEKKKQRRGCLMNVMCGRKLVCLK

SEQ ID NO: 395 - DNA, 24 bp, unknown
  MISC_FEATURE (1)..(24): Primer
atgtctgaaaaggccgttagaagg

SEQ ID NO: 396 - DNA, 26 bp, unknown
  MISC_FEATURE (1)..(26): Primer
ttataaaattatgcaacagttagccc

SEQ ID NO: 397 - protein, 20 aa, unknown
  MISC_FEATURE (2)..(2): Xaa is any amino acid
  MISC_FEATURE (4)..(4): Xaa is Val, Thr, Ile or Leu
  MISC_FEATURE (5)..(5): Xaa is Val, Ile or Leu
  MISC_FEATURE (9)..(9): Xaa is Ala or Gly
  MISC_FEATURE (10)..(10): Xaa is any amino acid
  MISC_FEATURE (14)..(14): Xaa is Cys, Ser or Ala
  MISC_FEATURE (15)..(16): Xaa is Leu or Met
  MISC_FEATURE (17)..(18): Xaa is any amino acid
  MISC_FEATURE (19)..(19): Xaa is Tyr or Phe
  MISC_FEATURE (20)..(20): Xaa is Thr, Ser or Ala
  MISC_FEATURE (20)..(20): consensus
KXVXXGDGXXGKTXXXXXXX

SEQ ID NO: 398 - protein, 13 aa, unknown
  MISC_FEATURE (1)..(1): Xaa is Phe or Tyr
  MISC_FEATURE (3)..(4): Xaa is any amino acid
  MISC_FEATURE (6)..(6): Xaa is Val, Ile or Glu
  MISC_FEATURE (9)..(9): Xaa is Val or Ile
  MISC_FEATURE (11)..(11): Xaa is Asp or Glu
  MISC_FEATURE (12)..(12): Xaa is any amino acid
  MISC_FEATURE (13)..(13): Xaa is Tyr or Phe
  MISC_FEATURE (13)..(13): consensus
XPXXYXPTXFXXX

SEQ ID NO: 399 - protein, 22 aa, unknown
  MISC_FEATURE (1)..(1): Xaa is Val, Ile or Tyr
  MISC_FEATURE (2)..(2): Xaa is any amino acid
  MISC_FEATURE (3)..(3): Xaa is Leu, Val or Ile
  MISC_FEATURE (4)..(4): Xaa is any amino acid
  MISC_FEATURE (5)..(5): Xaa is Leu, Ile or Met
  MISC_FEATURE (6)..(6): Xaa is Trp or Phe
  MISC_FEATURE (9)..(9): Xaa is Ala or Ser
  MISC_FEATURE (12)..(13): Xaa is Glu or Asp
  MISC_FEATURE (14)..(14): Xaa is Tyr or Phe
  MISC_FEATURE (15)..(15): Xaa is any amino acid
  MISC_FEATURE (16)..(16): Xaa is Arg, Lys or Asn
  MISC_FEATURE (17)..(17): Xaa is Leu, Ile or Val
  MISC_FEATURE (19)..(19): Xaa is Pro, Ser or Thr
  MISC_FEATURE (20)..(20): Xaa 20 is Leu or Met
  MISC_FEATURE (21)..(21): Xaa is Ser, Ala or Phe
  MISC_FEATURE (1)..(22): consensus
XXXXXXDTXGQXXXXXXRXXXY

SEQ ID NO: 400 - protein, 148 aa, unknown
  MISC_FEATURE (1)..(148): Xaa in all postions is any amino acid
  MISC_FEATURE (1)..(148): consensus
KXVXVGDGAXGKTCLLIXXXXXXXXXXXXXXFPXXYXPTVFXNXXXXXXXXXXXXXXXLXLWDTAGQEDYXRLRPLSYXXXXXXXXXXXXXXXXXXXXXXDVXXXXFSXXXXXSXXNXXXKWXPEXXXXXXPXXPXXLVGXKXDLRXD

1. A process for the production of fine chemical, which comprises
a) increasing or generating the biological activity represented by a protein as depicted in SEQ ID NO: 2, 4, 6, 8, 10, 12, 14, 16, 18, 20, 22, 24, 26, 28, 30, 32, 34, 36, 38, 40, 42, 44, 46, 56, 58, 60, 62, 64, 66, 68, 70, 72, 74, 76, 78, 80, 82, 84, 86, 88, 90, 92, 94, 96, 98, 100, 102, 104, 106, 108, 110, 112, 114, 116, 118, 120, 122, 124, 126, 128, 130, 132, 134, 136, 138, 140, 142, 144, 146, 148, 150, 152, 154, 156, 158, 160, 162, 164, 166, 168, 170, 172, 174, 176, 178, 180, 182, 184, 186, 188, 190, 192, 194, 196, 198, 200, 202, 204, 206, 208, 210, 212, 214, 216, 218, 220, 222, 224, 226, 228, 230, 232, 234, 236, 238, 240, 242, 244, 246, 248, 250, 252, 254, 256, 258, 260, 262, 264, 266, 268, 270, 272, 274, 276, 278, 280, 282, 284, 286, 288, 290, 292, 294, 296, 298, 300, 302, 304, 306, 308, 310, 312, 314, 316, 318, 320, 322, 324, 326, 328, 330, 332, 334, 336, 338, 340, 342, 344, 346, 348, 350, 352, 354, 356, 358, 360, 362, 364, 366, 368, 370, 372, 374, 376, 378, 380, 382, 384, 386, 388, 390, 392 or 394 in a non-human organism, or in one or more parts thereof; and
b) growing the organism under conditions which permit the production of the fine chemical in said organism.

2. A process for the production of fine chemical comprising increasing or generating in an organism or a part thereof the expression of at least one nucleic acid molecule comprising a nucleic acid molecule selected from the group consisting of:
a) nucleic acid molecule encoding of the polypeptide as depicted in SEQ ID NO: 2, 4, 6, 8, 10, 12, 14, 16, 18, 20, 22, 24, 26, 28, 30, 32, 34, 36, 38, 40, 42, 44, 46, 56, 58, 60, 62, 64, 66, 68, 70, 72, 74, 76, 78, 80, 82, 84, 86, 88, 90, 92, 94, 96, 98, 100, 102, 104, 106, 108, 110, 112, 114, 116, 118, 120, 122, 124, 126, 128, 130, 132, 134, 136, 138, 140, 142, 144, 146, 148, 150, 152, 154, 156, 158, 160, 162, 164, 166, 168, 170, 172, 174, 176, 178, 180, 182, 184, 186, 188, 190, 192, 194, 196, 198, 200, 202, 204, 206, 208, 210, 212, 214, 216, 218, 220, 222, 224, 226, 228, 230, 232, 234, 236, 238, 240, 242, 244, 246, 248, 250, 252, 254, 256, 258, 260, 262, 264, 266, 268, 270, 272, 274, 276, 278, 280, 282, 284, 286, 288, 290, 292, 294, 296, 298, 300, 302, 304, 306, 308, 310, 312, 314, 316, 318, 320, 322, 324, 326, 328, 330, 332, 334, 336, 338, 340, 342, 344, 346, 348, 350, 352, 354, 356, 358, 360, 362, 364, 366, 368, 370, 372, 374, 376, 378, 380, 382, 384, 386, 388, 390, 392 or 394 or a fragment thereof, which confers an increase in the amount of fine chemical in an organism or a part thereof;
b) nucleic acid molecule comprising of the nucleic acid molecule as depicted in SEQ ID NO: 1, 3, 5, 7, 9, 11, 13, 15, 17, 19, 21, 23, 25, 27, 29, 31, 33, 35, 37, 39, 41, 43, 45, 55, 57, 59, 61, 63, 65, 67, 69, 71, 73, 75, 77, 79, 81, 83, 85, 87, 89, 91, 93, 95, 97, 99, 101, 103, 105, 107, 109, 111, 113, 115, 117, 119, 121, 123, 125, 127, 129, 131, 133, 135, 137, 139, 141, 143, 145, 147, 149, 151, 153, 155, 157, 159, 161, 163, 165, 167, 169, 171, 173, 175, 177, 179, 181, 183, 185, 187, 189, 191, 193, 195, 197, 199, 201, 203, 205, 207, 209, 211, 213, 215, 217, 219, 221, 223, 225, 227, 229, 231, 233, 235, 237, 239, 241, 243, 245, 247, 249, 251, 253, 255, 257, 259, 261, 263, 265, 267, 269, 271, 273, 275, 277, 279, 281, 283, 285, 287, 289, 291, 293, 295, 297, 299, 301, 303, 305, 307, 309, 311, 313, 315, 317, 319, 321, 323, 325, 327, 329, 331, 333, 335, 337, 339, 341, 343, 345, 347, 349, 351, 353, 355, 357, 359, 361, 363, 365, 367, 369, 371, 373, 375, 377, 379, 381, 383, 385, 387, 389, 391 or 393;
c) nucleic acid molecule whose sequence can be deduced from a polypeptide sequence encoded by a nucleic acid molecule of (a) or (b) as a result of the degeneracy of the genetic code and conferring an increase in the amount of fine chemical in an organism or a part thereof;
d) nucleic acid molecule which encodes a polypeptide which has at least 50% identity with the amino acid sequence of the polypeptide encoded by the nucleic acid molecule of (a) to (c) and conferring an increase in the amount of fine chemical in an organism or a part thereof;
e) nucleic acid molecule which hybridizes with a nucleic acid molecule of (a) to (c) under stringent hybridization conditions and conferring an increase in the amount of fine chemical in an organism or a part thereof;
f) nucleic acid molecule which encompasses a nucleic acid molecule which is obtained by amplifying nucleic acid molecules from a cDNA library or a genomic library using the primers in SEQ ID NO: 53 or SEQ ID NO: 54 and conferring an increase in the amount of the fine chemical in an organism or a part thereof;
g) nucleic acid molecule encoding a polypeptide which is isolated with the aid of monoclonal antibodies against a polypeptide encoded by one of the nucleic acid molecules of (a) to (f) and conferring an increase in the amount of fine chemical in an organism or a part thereof;
h) nucleic acid molecule encoding a polypeptide comprising the consensus sequence as depicted in SEQ ID NO: 47, SEQ ID NO: 48, SEQ ID NO: 49, SEQ ID NO: 50, SEQ ID NO: 51, SEQ ID NO: 52, SEQ ID NO: 397, SEQ ID NO: 398, SEQ ID NO: 399 and/or SEQ ID NO: 400 and conferring an increase in the amount of the fine chemical in an organism or a part thereof; and
i) nucleic acid molecule which is obtainable by screening a suitable nucleic acid library under stringent hybridization conditions with a probe comprising one of the sequences of the nucleic acid molecule of (a) to (k) or with a fragment thereof having at least 15 nt, preferably 20 nt, 30 nt, 50 nt, 100 nt, 200 nt or 500 nt of the nucleic acid molecule characterized in (a) to (k) and conferring an increase in the amount of the fine chemical in an organism or a part thereof,
or a nucleotide sequence complementary thereto.

3. The process of claim 2 further comprising recovering the free or bound fine chemical.

4. The process of claim 2 further comprising the following steps:
a) selecting an organism or a part thereof expressing the polypeptide encoded by the nucleic acid molecule characterized in claim 2;
b) mutagenizing the selected organism or the part thereof;
c) comparing the activity or the expression level of said polypeptide in the mutated organism or the part thereof with the activity or the expression of said polypeptide of the selected organism or the part thereof;
d) selecting the mutated organism or the part thereof, which comprises an increased activity or expression level of said polypeptide compared to the selected organism or the part thereof;
e) optionally, growing and cultivating organism or the part thereof; and
f) recovering, and optionally isolating, the free or bound fine chemical produced by the selected mutated organism or the part thereof.

5. The process of claim 2, wherein the activity of said protein or the expression of said nucleic acid molecule is increased or generated transiently or stably.

6. An isolated nucleic acid molecule comprising a nucleic acid molecule selected from the group consisting of:
a) nucleic acid molecule encoding of the polypeptide as depicted in SEQ ID NO: 2, 4, 6, 8, 10, 12, 14, 16, 18, 20, 22, 24, 26, 28, 30, 32, 34, 36, 38, 40, 42, 44, 46, 56, 58, 60, 62, 64, 66, 68, 70, 72, 74, 76, 78, 80, 82, 84, 86, 88, 90, 92, 94, 96, 98, 100, 102, 104, 106, 108, 110, 112, 114, 116, 118, 120, 122, 124, 126, 128, 130, 132, 134, 136, 138, 140, 142, 144, 146, 148, 150, 152, 154, 156, 158, 160, 162, 164, 166, 168, 170, 172, 174, 176, 178, 180, 182, 184, 186, 188, 190, 192, 194, 196, 198, 200, 202, 204, 206, 208, 210, 212, 214, 216, 218, 220, 222, 224, 226, 228, 230, 232, 234, 236, 238, 240, 242, 244, 246, 248, 250, 252, 254, 256, 258, 260, 262, 264, 266, 268, 270, 272, 274, 276, 278, 280, 282, 284, 286, 288, 290, 292, 294, 296, 298, 300, 302, 304, 306, 308, 310, 312, 314, 316, 318, 320, 322, 324, 326, 328, 330, 332, 334, 336, 338, 340, 342, 344, 346, 348, 350, 352, 354, 356, 358, 360, 362, 364, 366, 368, 370, 372, 374, 376, 378, 380, 382, 384, 386, 388, 390, 392 or 394 or a fragment thereof, which confers an increase in the amount of fine chemical in an organism or a part thereof;
b) nucleic acid molecule comprising of the nucleic acid molecule as depicted in SEQ ID NO: 1, 3, 5, 7, 9, 11, 13, 15, 17, 19, 21, 23, 25, 27, 29, 31, 33, 35, 37, 39, 41, 43, 45, 55, 57, 59, 61, 63, 65, 67, 69, 71, 73, 75, 77, 79, 81, 83, 85, 87, 89, 91, 93, 95, 97, 99, 101, 103, 105, 107, 109, 111, 113, 115, 117, 119, 121, 123, 125, 127, 129, 131, 133, 135, 137, 139, 141, 143, 145, 147, 149, 151, 153, 155, 157, 159, 161, 163, 165, 167, 169, 171, 173, 175, 177, 179, 181, 183, 185, 187, 189, 191, 193, 195, 197, 199, 201, 203, 205, 207, 209, 211, 213, 215, 217, 219, 221, 223, 225, 227, 229, 231, 233, 235, 237, 239, 241, 243, 245, 247, 249, 251, 253, 255, 257, 259, 261, 263, 265, 267, 269, 271, 273, 275, 277, 279, 281, 283, 285, 287, 289, 291, 293, 295, 297, 299, 301, 303, 305, 307, 309, 311, 313, 315, 317, 319, 321, 323, 325, 327, 329, 331, 333, 335, 337, 339, 341, 343, 345, 347, 349, 351, 353, 355, 357, 359, 361, 363, 365, 367, 369, 371, 373, 375, 377, 379, 381, 383, 385, 387, 389, 391 or 393 or a fragment thereof, which confers an increase in the amount of fine chemical in an organism or a part thereof;
c) nucleic acid molecule whose sequence can be deduced from a polypeptide sequence encoded by a nucleic acid molecule of (a) or (b) as a result of the degeneracy of the genetic code and conferring an increase in the amount of fine chemical in an organism or a part thereof;
d) nucleic acid molecule which encodes a polypeptide which has at least 50% identity with the amino acid sequence of the polypeptide encoded by the nucleic acid molecule of (a) to (c) and conferring an increase in the amount of fine chemical in an organism or a part thereof;
e) nucleic acid molecule which hybridizes with a nucleic acid molecule of (a) to (c) under stringent hybridization conditions and conferring an increase in the amount of fine chemical in an organism or a part thereof;
f) nucleic acid molecule which encompasses a nucleic acid molecule which is obtained by amplifying nucleic acid molecules from a cDNA library or a genomic library using the primers in SEQ ID NO: 53 or SEQ ID NO: 54 and conferring an increase in the amount of the fine chemical in an organism or a part thereof;
g) nucleic acid molecule encoding a polypeptide which is isolated with the aid of monoclonal and/or polyclonal antibodies against a polypeptide encoded by one of the nucleic acid molecules of (a) to (f) and conferring an increase in the amount of fine chemical in an organism or a part thereof;
h) nucleic acid molecule encoding a polypeptide comprising the consensus sequence as depicted in SEQ ID NO: 47, SEQ ID NO: 48, SEQ ID NO: 49, SEQ ID NO: 50, SEQ ID NO: 51, SEQ ID NO: 52, SEQ ID NO: 397, SEQ ID NO: 398, SEQ ID NO: 399 and/or SEQ ID NO: 400 and conferring an increase in the amount of the fine chemical in an organism or a part thereof; and
i) nucleic acid molecule which is obtainable by screening a suitable nucleic acid library under stringent hybridization conditions with a probe comprising one of the sequences of the nucleic acid molecule of (a) to (k) or with a fragment thereof having at least 15 nt, preferably 20 nt, 30 nt, 50 nt, 100 nt, 200 nt or 500 nt of the nucleic acid molecule characterized in (a) to (k) and conferring an increase in the amount of the fine chemical in an organism or a part thereof,
whereby the nucleic acid molecule distinguishes over the sequence as depicted in SEQ ID NO: 1, 55, 57, 59, 61, 63, 65, 67, 69, 71, 73, 75, 77, 79, 81, 83, 85, 87, 89, 91, 93, 95, 97, 99, 101, 103, 105, 107, 109, 111, 113, 115, 117, 119, 121, 123, 125, 127, 129, 131, 133, 135, 137, 139, 141, 143, 145, 147, 149, 151, 153, 155, 157, 159, 161, 163, 165, 167, 169, 171, 173, 175, 177, 179, 181, 183, 185, 187, 189, 191, 193, 195, 197, 199, 201, 203, 205, 207, 209, 211, 213, 215, 217, 219, 221, 223, 225, 227, 229, 231, 233, 235, 237, 239, 241, 243, 245, 247, 249, 251, 253, 255, 257, 259, 261, 263, 265, 267, 269, 271, 273, 275, 277, 279, 281, 283, 285, 287, 289, 291, 293, 295, 297, 299, 301, 303, 305, 307, 309, 311, 313, 315, 317, 319, 321, 323, 325, 327, 329, 331, 333, 335, 337, 339, 341, 343, 345, 347, 349, 351, 353, 355, 357, 359, 361, 363, 365, 367, 369, 371, 373, 375, 377, 379, 381, 383, 385, 387, 389, 391 or 393 by one or more nucleotides.

7. A nucleic acid construct comprising one or more regulatory elements which confers the expression of the nucleic acid molecule of claim 6.

8. A vector comprising the nucleic acid molecule as claimed in claim 6.

9. The vector as claimed in claim 8, wherein the nucleic acid molecule is in operable linkage with regulatory sequences for the expression in a prokaryotic or eukaryotic host.

10. A host cell transformed stably or transiently with the nucleic acid molecule as claimed in claim 6.

11. The host cell of claim 10, wherein the host cell is a transgenic host cell.

12. The host cell of claim 10, which wherein the host cell is a plant cell, an animal cell, a microorganism, a yeast cell, a fungus cell, a prokaryotic cell, an eukaryotic cell or an archaebacterium.

13. A process for producing a polypeptide, wherein the process comprises stably or transiently transforming the nucleic acid molecule as claimed in claim 6 into a host cell, and expressing the polypeptide encoded by said nucleic acid molecule in the host cell.

14. The polypeptide produced by the process as claimed in claim 13 wherein the polypeptide distinguishes over the sequence as depicted in SEQ ID NO: 2, 56, 58, 60, 62, 64, 66, 68, 70, 72, 74, 76, 78, 80, 82, 84, 86, 88, 90, 92, 94, 96, 98, 100, 102, 104, 106, 108, 110, 112, 114, 116, 118, 120, 122, 124, 126, 128, 130, 132, 134, 136, 138, 140, 142, 144, 146, 148, 150, 152, 154, 156, 158, 160, 162, 164, 166, 168, 170, 172, 174, 176, 178, 180, 182, 184, 186, 188, 190, 192, 194, 196, 198, 200, 202, 204, 206, 208, 210, 212, 214, 216, 218, 220, 222, 224, 226, 228, 230, 232, 234, 236, 238, 240, 242, 244, 246, 248, 250, 252, 254, 256, 258, 260, 262, 264, 266, 268, 270, 272, 274, 276, 278, 280, 282, 284, 286, 288, 290, 292, 294, 296, 298, 300, 302, 304, 306, 308, 310, 312, 314, 316, 318, 320, 322, 324, 326, 328, 330, 332, 334, 336, 338, 340, 342, 344, 346, 348, 350, 352, 354, 356, 358, 360, 362, 364, 366, 368, 370, 372, 374, 376, 378, 380, 382, 384, 386, 388, 390, 392 or 394 by one or more amino acids.

15. An antibody, which binds specifically to the polypeptide encoded by a nucleic acid sequence as claimed in claim 6a).

16. A plant, or plant tissue, propagation material, or harvested material thereof comprising the host cell as claimed in claim 12, wherein the host cell is a plant cell or an Agrobacterium.

17. A method for screening for agonists and antagonists of the activity of a polypeptide encoded by the nucleic acid molecule of claim 6 conferring an increase in the amount of fine chemical in an organism or a part thereof comprising:
(a) contacting cells, tissues, plants or microorganisms which express a polypeptide encoded by the nucleic acid molecule of claim 6 conferring an increase in the amount of the fine chemical in an organism or a part thereof with a candidate compound or a sample comprising a plurality of compounds under conditions which permit the expression of the polypeptide;
(b) assaying the fine chemical level or the polypeptide expression level in the cells, tissues, plants or microorganisms or a media wherein the cells, tissues, plants or microorganisms are cultured or maintained; and
(c) identifying the agonist or antagonist by comparing the measured fine chemical level or polypeptide expression level with a standard fine chemical or polypeptide expression level measured in the absence of said candidate compound or said sample comprising said plurality of compounds, wherein an increased level over the standard indicates that the compound or the sample comprising said plurality of compounds is an agonist and a decreased level over the standard indicates that the compound or the sample comprising said plurality of compounds is an antagonist.

18. A process for the identification of a compound conferring increased fine chemical production in a plant or microorganism, comprising the steps:
a) culturing a plant cell or tissue or microorganism or maintaining a plant expressing the polypeptide encoded by the nucleic acid molecule of claim 6 conferring an increase in the amount of the fine chemical in an organism or a part thereof, and utilizing a readout system which is capable of interacting with the polypeptide under suitable conditions which permit the interaction of the polypeptide with said readout system in the presence of a compound or a sample comprising a plurality of compounds, and said readout system is capable of providing a detectable signal in response to the binding of a compound to said polypeptide under conditions which permit the expression of said readout system and the expression of the polypeptide encoded by the nucleic acid molecule of claim 6 conferring an increase in the amount of the fine chemical in an organism or a part thereof;
b) identifying if the compound is an effective agonist by detecting the presence or absence or increase of a signal produced by said readout system.

19. A method for the identification of a gene product conferring an increase in the fine chemical production in a cell, comprising the following steps:
a) contacting the nucleic acid molecules of a sample, which can contain a candidate gene encoding a gene product conferring an increase in fine chemical after expression with the nucleic acid molecule of claim 6;
b) identifying the nucleic acid molecules, which hybridize under relaxed stringent conditions with the nucleic acid molecule of claim 6;
c) introducing the candidate nucleic acid molecules in host cells appropriate for producing the fine chemical;
d) expressing the identified nucleic acid molecules in the host cells;
e) assaying the fine chemical level in the host cells; and
f) identifying nucleic acid molecule and its gene product which expression confers an increase in the fine chemical level in the host cell after expression compared to the wild type.

20. A method for the identification of a gene product conferring an increase in fine chemical production in a cell, comprising the following steps:
a) identifying in a data bank nucleic acid molecules of an organism; which can contain a candidate gene encoding a gene product conferring an increase in the fine chemical amount or level in an organism or a part thereof after expression, and which are at least 30% homolog to the nucleic acid molecule of claim 6;
b) introducing the candidate nucleic acid molecules in host cells appropriate for producing the fine chemical;
c) expressing the identified nucleic acid molecules in the host cells;
d) assaying the fine chemical level in the host cells; and
e) identifying the nucleic acid molecule and its gene product which expression confers an increase in the fine chemical level in the host cell after expression compared to the wild type.

21. A method for the production of an agricultural composition comprising identifying a compound according to the method of claim 17, and formulating the identified compound in a form acceptable for an application in agriculture.

22-24. (canceled)

25. Food or feed composition comprising the nucleic acid molecule of claim 6, a nucleic acid construct or a vector thereof, a polypeptide encoded thereby or an antibody which specifically binds to said polypeptide, a plant, plant tissue or harvested material thereof, or a host cell containing said nucleic acid molecule.

26. (canceled)

27. A composition comprising the nucleic acid molecule of claim 6, a polypeptide encoded thereby, or an antibody which specifically binds to said polypeptide, or a nucleic acid construct or a vector thereof, and optionally an agricultural acceptable carrier.

28. A composition comprising an antagonist or agonist of the activity of a polypeptide encoded by the nucleic acid molecule of claim 6 conferring an increase in the amount of fine chemical in an organism or a part thereof.

29. Food or feed composition comprising the antagonist or agonist identified according to claim 17.

30. A method for identifying plant varieties having increased capacity for production of a fine chemical, wherein the method comprises using the nucleic acid molecules as claimed in claim 6 in mapping and/or breeding processes, and identifying plant varieties which have increased production of said fine chemical.
